United States Patent Application Publication US 2007/0281896 A1 - sequence listing, part 3

SEQ ID NO: 273 - DNA, 89301 bp, Homo sapiens
cggaccgccacacgggtccggtgcccgctgcgcttccgccccagcgctcctgaggcggccgtacaatcctcggcagtgtcctgagactgtatggtcagctcagcccggcctccgactccttccgactcccagcattcgagccacttttttttttctttgaaaactcagaaaagtgactccttttccagggaaaaaggaacttgggttcccttctctccgtcctcttttcgggtctgacagcctccacccactccttccccggaccccgcctccgcgcgcaggttcctcccagtcacctttctccacccccgcccccgcacctagcccgccgcgcgccaccttccacctgactgcgcggggcgctcgggacctgcgcgcacctcggaccttcaccacccgcccgggccgcggggagcggacgagggccacagccccccacccgccagggagcccaggtgctcggcgtctgaacgtctcaaagggccacagcgacaatgacagctgacaaggagaagaaaaggtaagcgggcgtccgggccgatcagggggccggtccgaggccagggccgggctgcgcggggcaggcgcgaccgagagtggttgggagaagagtgctgagaggtcttcggagctcgaggctcggtttggagggctgtgagggggagagcatgtgcccggtttgggggcgcggatcagcagctttgcagtggagacttctgcggctcggaggagtcggggatttgcgcgcacggcgaggccaggaggccgagggagatggcctggaggtcggaggtgcttccgcggtgcctttgaaaatctcccagccgccccgcaccagattaccgtggccaccggcgcttggaaatgtttgtgggtgcatgtcctcgactttctctggtctctcattttggggcagcatccacgtctctatttttctctggattcgcggagtccttccaaatgcgctcctgtgcccgcgccgcggcccaagtgggcaaaggggggcgggaggcggagagcggctcagggacacgatcctaccgaggagccaggacccttcagagcgccccgctgccgggctccagaccccaccgaaggttggagaacccacttcctcgtgccgcaccttgactctggggagagtaggtagtgagtgacctggattgccctgcgggggcagatggttcggtgtgtaggaagcggacggcaacactggatgtccctggcaggtccgggtgtctgtctccgaagaggacagagaagggcagccacgatctgcccgcctgccctcgcgagcctctcggcactgggtgagaggcaactctggccatttcttgctgccctctcgccctctcccggccgctcccagtccagccgggcccggcgctacccgagcgagggttcgagccctctgcgcggccgcgcagaagcaggcagggcctcaacttctgcaaatgtgtgcggctcgccgcctgtcccctttctcctcctgtctccacccgtgcggccccagtggcctggagcttccagccccgcgctcggccgcggcttggcgaggctatgctgcgggaagctggaatccaacgcgcggccggctgaaccgcctgagccgcgggaaaccagcggcggagcggcggtatagaggtgcgaggatgaggaggaccgactcgctaagggagggaggtgactggccgggagggctcactgccgaggttgatttgctcttgttccaacttccactacgggactggagccagaaaccgtgtatcctccggtcgaaagcagcggttcccacctcggggcaccgataaggatttgataaacgggagcgaatcgcgcctgtcctggctcggcgcccgggcccttcactgcgggatcgctaggggaggggattgggccctgctcccctttcctggccgtagtcccccctttctcgtcaccgtcgcgccctcagacccaagacaagtgagggagccctgagactgcagccggcacattcccagggccctcggagcagtcctggggttccatgtcttttgaaggcagcagagcaaggaaaagactcttaagattccagtgcgttttgtaaaaaccaatcataatgctaataatgactgaaccatcgaaaagcaaagttatagacagcgcctgcagacgctttcgggtccggagccggggagggaacttgtgtattttacaactgcgatgcctatcgggaatgtggcaatcgccgaggtggggcctgacagtaatcttgacaaatgtgtgaagtgtcagctcctcctgcgctccttagcgccgggttttgtgcagttttgtaccgtatataccgagaaacttgggagcaggggaaaaatgatttcgacacacccagctacagtacctggttcgttagcggactgttggaaagagagaagaagcgggaatgggagcgggaagaacgttgcgtaattagactcccaattattggcgagagcggccgctttaagaaccactgtggggactgcctgcgaaacgccttggaggccgctgtgtgagctgcggctccgggctggtggccacgcgagggtgtccgccctcttcgacctgcctggatttttgtgctgcagaatggcagggcaaacagcgtgtccttcaccatctagagccccttaaggggttgtccaattcctattgggctaatcagtttgagactcatttacttttcgtgcctgggtctgtttgctggctgcaggcttctttagggaccaagatgtaattaaaatatgtgaaccaatacattgaaagttggtgttgtcatgtaagtgactgctgtagcttttctgagtgcctcacaagggcgatgtgacagtgagggggctctctgctgatgattctgcccactagttcttacattttgtgtttctttggtttagcagagcagtttcttcccccaaatgcaatatgggcagaacatttggaatattcgttctaacaatggcccctcaagaagtgggcagatgattttgtcccagaatgttcacacgtcgataaatatgttaatgtttaataataaagagtttgctttctaaatgttagttggctgggtgtccttgatagtaccagttttggtggtagtgggcatttgcggtgacatcacagatgtcagaaactgaagcctggtgggtgggggtactgcactttcactcacctttttgtgcacgcatctatcaggaatgcctgagtcctttcactgggaaaaaaatgtggaaattctggggttcacggggtttgaggagtggttcaggcaaatgtaaatgagatccttggataatcagggatcaaagtccagtcccaaagccagacctaggtccagacaccttcccagagtgcttatacagtagtgctcagtacagggctagcgtggaaggggaattggagacacctggatctccaatctccccctccttctgacagctggacttagttgttcctcttctaaaatcaaatcaaactccatcattattccaactctgaagggaaaaaatattgctggacagtttctctcaatttaaacatatattttaaataaatattccctccacacttgatatgtttccattgtattaccagcagcgcaggatgatacagaattgatgtaacacattgttggcttgagtatttaagttttaattcatacagttttcatgaagttcaaaagaatgccatcatttcaagtttttttcagtggtgcttatagggagcctagaattattttataagagaccatggaaatcatctagtcagacttttctctttctggataaggaaactgatgccgagagaggttaaaagacttctccggtcacaaggaaaattagtgctgataagagtcagggctggtcgcggtggctcatgcctgtaatcccagcactttgggaggctgaggctgcggatcacctgaggtcaggagttcaagaccagcctggtcaacatggtgaaaccccgtctctattaaaaacacaaaaaaattagccgggcgtggtggtgggtgcctgtaatcccagctattctggaggctgaggcaggagaattgcttgaacccgggaggtagaggctgcagtgagcggagatagcgctgctgcactccagcctgggcaagaggtgaaattccgtctcaaagaaaaaaaaaaaaaaaagtcagaaccctggtttattactttcaattaagtatgtattttcctattgttcacaggagagtaccccagccctgaaatatctctagatagtgaggatgatttccgaaggagtgccttccccatcacaactctcaaaccgctgaaccttatagaaaggagatttgcttttctggataattatcaacacctttaggctgcagtagaagtgatgattctgtttgctttatgaaaaaaaaaaaaaaaaaggaagcagagttgaattgatgctgttcccagtgtctgtaaactttgagaagtatgaattcattgttttagttagaaaaaaatctacttatataggtagacctcattaaacaaaaccaatgcaaggaccgctcctcagtggagcagattgctttttgaggtagagaacattcaagcagctgctagattgatttttgtactgggttagttggcattttcactaggagtgaaaactgtgagactaaacagtttaatttacttagaatgtccctctttctctctctgtgtgtgtgtgtgtgtgtgtgtgtgtgtgtgtgtgtgtgcccgtgcgtcggcggggggggcagtggtgattctcaactttctaggaatttattaagtaaagtgtttagaaatggaaggaaacaattagataattctcagtgctccaggattttaggctcctacatttgaaaatacttgctgtcattaattgtcttgagatttaggcttttccacttttcaggaaatctagtagttttttgggggttttgttttgttttccttggttctgccctatgccaacctgctagtttccctttttattttagcctgatgaatcttcccttttgctttcagtactaaccattgctggtagttcttaacaggtctagcttttaccaatattgtcaagttagcaatattagctcctggggccctagtactctgtacttccacccctctccccaccagtaccatgctgcctgttcacatgatggacaccagctctgatattcaccctaagatataatccataagatgacaaacttgtattcaacaccgactcctactctggctaaaatgctgaagagaatactaagaaataggggatatggtcctggtcatcaagttgcttagtctgattaggaaaaaaaaaaaaaaaagagatacaaggaagcttaagtaaaaatataaggggttgggcgtggtaactcatgcctgtaatcccagcactttgagaggccgaggcaggcagatcacgaggtcaggagtttgagaccagcctggccaatatggtgaaaccccatctctactaaaaatacaaaaaattagccaggcgtggtggcgtatgcctgtagtcccagctactcaagaggctgaggcaggagaatcgcttgaacccgggaggcggaggttgcagtgagccgagatcgtgccactgcactccagcgtgggtgacagagcgagacaacgtcaaagaaagaaagaaaagaaagaaaatataaagagctgacagcctacatgcttttctgtagaaatctaatattttgaagcaaaagataagctctgagtagcatttcaggtaataaccgcccccctccccaacacacacataagcacacacaattatttaagagtattatgtgtatttagaggtggagaaatttgttcctagtgtccccggaaccacacagagtaggtgctgaccaccagcttaaagactggctcagaaggaaggtcaaatgggagaaggcagtctttgagggctaacgagaggaaagaaaacacacaaggctccctatggtgtatcccttatcatgtacttcgacaccatacacaggaaggcccctgaaatggaatgtttgctgttctttatacacttgctttgggtggggacatggaaagggagctggtggggctccacagacaacaggggtagtaatttctgttcccctgagaatatcagtggagacagctatgactccaggaaggccaagaagggagagggagcttcttaaccaggctttgtgaatgggtttcagaggctggcgtgtaaatctctgaaaatgtgtgcaagacattatgtatagaagcaacttgttctaaaggaagtctgttcagctctccatagcctttcaaaggttctaggatatggaaaaggcaagcccttgctcttggatgtctgatttggtgactgtcttatgtttcagagtcttcctgttcagatcccagacagttcttgtgttttactgccattgcctctccctgtggtgaagaatggggaggaggaaggtgtgtgtatttagtaaaggttctgaggtgccgcttaatcttccctgtccctggctggcgtgtccgtccacctacatgtctgccctcagtcttggaaggacgggaagccaagtgccctgcacagggtaaatactggtatgattcattttattaatgcttctgaaaaatgactgtgaaaacaaatttatcctcaaatgttccatcatcctcaaacagttatttggatgaccttcatgttctaggaatgtatgtggtcttaatagaaattatattttgcatcaggacaacacaaaaaactgacagtcttatttgtgccagtgccgtcctcagaactttacatggattaactttttaatcctgtgagataagccctgttattatccccacttcattgatgggaaagctgaagtctagaagggctaactgcccaaggtcgtataggtagcatgggcagagctgcattcaacctgagtaaaggaggtccccagagtctatactctcaatgggtgttccatacgcccttcccttactgaagatatctataaagtatttaatactgcttctgactcacaataagtgctctataaatgacaactgcctttgttgttttccttgtaattataattacttttcttttttgtgatttatcacttgcatcaaacctcacaagcagatagggattgaagatctgaaaggccaacatggaactccttgaatttcttatttttcatgggttttcctagaccctgacaagaggtggttctctcctgccccaagaaattcaaagctttccacatcccacccttcgctggtggcaagacttcaataattacttcagccttcggactccattgtgcaggagaacctgttagaagctcttcctctgtggcttctgaagaaccatcaagatgcacaggacttcctgtggctcttttgatcttttgaaattgcaagcacaggaaggaaagaatggatagggggataaagaatagctatgattgttgtgataatagcatgttgcatttctatagagccctttcgctgatgagccctgagccttaacagccatcacactgttggcccctgcactgtgaacctagagggtaccttgagtttttctagtgctgccaaacagaattgcattgacacataccttaatcaagagagaagcaagccgtgttggcaactgtgcatcacagtcgatgtggtggtcatccatgggatgcccctaatagcatctgtaattttcaagtagatgttgggtgtaatttggtgacccttgtctgttcccactgttggaagccccataactgatctgatgaaagcataaagtgaagaagagtggcgagaccctttgtgagatacctggagctgaagagtcaggtgtggaatggacaagaatgttatccacttctaagtgaccttgttttttctaatttcttaagaaatacctgtttgcttgactgccttaggctgtttgcaggggccacttgtacgtcagcaaaactcttactagatgacatcactgccagaagttccacatgtttccaggaggcacatttcccactgcccccactcccccgaacttggaaagattcctcagttttaaagttataagtaatttccatgccagataatgatcctgtgaacagatccttttctcatgtggaaaaatatttcagaaagggtgtcttgtcaatgagaaaaatgaccccattgaaacatatgtttatttgccatgtactcatctgacgttttgtgaattctataaagccatggaagtggattgttagaagtgtctcatacacccctagtgacttcttgaactatcccccccatccccagccatggaactctcctattaaaaaaactaagagataagtggtagcaatcttaacaaattagtgattttatctggttaggccgtgtaatcaaacacgtgggcaggaaagtggatccattatgttgtactcatgattgtggtgctgaaggtaacccccattgccctgtaggctgcccccagaagcagggggtacagccaatagtattcttagaagttaatcaattctgtaacgggttgagtgttttggtctcatttttagtccgaggtgccctgatgctggcctgtgactaaggggagtcagtggcttgttatgaataagaggacacatgagctgaatctgagaaagttcagaagcattttataagttgtttaaaatacatccattaaagtatatgattattttttggtaatcatttaaatcattgtgctgtgtgtctacccagacagtatttatctgtctctcgatgttgtattagtatagtattaaaaaaatacacacatttcactcttgataaaaactttgcatactgtcactactttgtataagttttttcctgactgcctctggttagggggcagggagcaagaagaccagcatgctttccttcctttatatttgggaaatggaggtgctgagagaaacaagccacactgtctgaagtaaaacctagaagtggacctgggtgtccatggtgagggaaagcccatatgtaccaccttgggctccagttacaaggtaatgagccatgagcacaaaagggtgactcaaaattcaatgccagccattctcattactaatgagcaattacagcaaatatttacaggcctccttcctacctttatgacttcctgttactgaagcactttggagtattgagaaagattgtcctggaaaaatacgtcacacacagttgcaggaaagagtgcctttaagcacacataaaaactcggttacttggctttgtttatgaattccacatagaaacaacagaaaattgtgccttttgaggaactgcttgagaatccttccttctgcatttcaagacaagattttaaaaatcacatatatcaaatatatggggaaatgagacacaatgtttttagagagtgtctagaaataataggactgtgcaagttagtacagcaaaattttgggtcaaagcatgggtcatttgacaaactctctttatgaacattacctctgcaatatttttctaaatgaaaacaatcacacttaatagaattaatcaggatgggagctagaagcatataattcactttccacagattggagtaaatcctcataatgcccctttcctgtgtatttagttaaaaaagcactccagtgagactgctttcgcagtaagtttctgtaaaccactgtacccttgtatttctctcctgtgtttccaagagttctcagatgctattttcgaatggcagcgttcactccagagctggctgaggtcgacgaagctaattttggtgccttggtgcccagggtgaagggagagagaagtcctctgcagagccaaaaggactctctggggcctgggtttggagcagtgtggtgttgctggacacaccacatttcacctttagaacctttatttgtgtgcttgcacaacaaatgtttacccagatattaagataaggaaagtatgaaggtcacatttcactggtgacaagagagcttctataaatgtaaccatatcgttgtgcagcgggagtctgtcttttattctgtacccgggacttagggggaattattggtgggtggggcatgggagttgaggctcttcttggttttctggctttcttgctatcactctgtttgtcttgcctcagctgatgtgcgcctcccatttggtaagggcctttgtcatggccaagacatctaaagaaatcctagtctgtgtggctgggcactgtgtggtcccctgactctctggagtcttccagagttccatggaaattagtgcccccgtgcatttccctgccgactgactggaaggcaccctggctgctgagatcgctttcctggtcccccagaagaggtccacatggtgctgatcctgcagctgttttaggcctcctcagcgggattgtcctatcctcggagcacagagaatcttcagagtgggataggggtttcttttgtggatttgggtttctcttagggatctccaaagattagctagacactcagggcctcagtaaagacatgggtccttggtctagttttcttcccaagggcagccaccatggcagtgggagttcaccttgctgactgcaagggaccccacctcacctctatcgcccattcaccatcattcactgtgcctcctgagttcctaatacacaagcctcctcccacagcctcaaaggcagtgctgcagtactcattcccacttctattccctcacactagctcctccatctggatgcttttcccctctcttcctattcaaatagctcctacttttctattgtgagcccaggcttcccgaaatcttacacaaaatcactaagggagcgtagaaatttccacagtggcactcccactccctgcattactagcttttggttgtttgccaaagagcctgcttatatttccttgttatctaatgacactttatttgtttttgcctttctaacaatatagcatgttcctgaaggccaaggatgtctgattttctgatgtgccctaataccttgcttgctttttttttggggggggggggctctgaaatcatgcttagttttttaaaaaaaataatagaattgctttgttcatgtcccttgggttacttggaaagcctgcctcacaagctctgctttctttattcatgtagatttgacccctttacttatttccctttaaaaagaaagaaaaaggaaaagaaaaaatttgggggaccacagtcaggtcttattgatacataactttatatcagatgcaaacgtcaggctagtattatatcagtgcttcacttcaagaatgccttatacactaatgtgagtacagccaaacagaatactccagcttaatctcaaagttaaaagcaagatggggaagttgtgcaagagggcactagctctcagttcagagatcatcttccctgggaagccttccctgattaactgcacattggttacccctgtgtttatagatggtcttcagtctgtattttgttatttgtatgatgcttttacaacttgcttttgaaggttgggggtggcgtatgtccctgatcaccactcaagtggtaagcccttcaagagcaaagacccagtcattttttcctgttcttttttccccacagaagtcagaatagaggtctcttgaggtgctcagtaattatttgtagactgagtaattctgtctatgtcaggaactttgggagtttggtgtagagaactggaagcacaggtagacactttgctcacatcaacctaacttatcctcattgcttatccaccatgcgtagagcagggtttgtgggaatcatcactgtgtgtagatgtttataggttccctcccaaattcaggtgctatgctgtacggtgaggttacaaagaggcattagatggaccctgcactcaggatgtcctaaaatgatttgtttaagcaatataagatgatttatgttaatggatgtccaagctgcctttacaatgttgccatcttgttaggaagtcacaaccaactcagataaaacattgagcaaacaatggaagattgatagtaattaagtgagagtgagtaagggtaaatagatcttgtgtgttgggaatagttagggaagtgattagtggagattagagggaggtttattggaggagcatgaagacctaggtctgtcttgaagattaggtagaatttggataggcagatgagtatggggcattccatttgaggtgaattgcgtaagtaaaatgagaaggcagcaataaacagagtgtgcaggccaggactggtgagccagttccttccagggctggatctggagctctgttagcagaaaggagatgaggaccaggcctgggctggtgttgggaagtttaggggcaggccttcctgagtcatgttgtgatggaatctttgggttgccttggggccatgggagcagtgcatgcctcttctggcacatgagaagctgctcagggcatctccatcattagcccttcaaccagaagcctagctctagtgtgagcatcaagtgggtggttggaggaggccatgatttgtcttctataatattgacctcaaagcctcccctgctagcccttagtaaatcaggcatgtgtgaatgtgcccaaatcactctgatatatgtttctttttggcctgtaccacttctcagggtaataaacgccatgtctgagtctcctagtgcatggagtgggagctggaagaggacagcttgctgtatcctaaaatagcagtgaccctcatccccatgttctctttctgatggtaaagactttgtccccctcattatttgataaggttctctttctgatggtaaagcctttgtccccctcattatttgataaggctctcattctgtccctttctcattctggattctaggtttttgagtctaaccattatggaaagagaacagtcccttcaatatcccactatctgtagggcatgacacagccaaatccaagtcagaccatccctttgatcaatttctaccaataactgttcattgcacaccctgtacagagcactgcgaccaagctgttccttgaccttctcctttcctagtgtttggtcacaacactccctaaagccctaactcaagttcttgggatgataccaccagaagagggaaaaaaggagccgtcttcctgaagtcacctgggtagagcagctggggatttttccctcctcgagcaggtgtaacctttcccctggaggaatttagaaacacttaaagtcatacctgaacactgtgggccaggccttggccagagatcccaagtcactggagaagattccattccagggaccagtagaggccagcgggtctcatccaagtcactttagctcattctgtccaccggtactttgagggaggctatataactcctgagtacttttggcttagaatttaacctcacaatgacaactgcgtgtttggcctttttttttgagacggagtctcgctctgttgcccaggctggagtgcagtggcacgatcttggctcactgcaagctctgcctcccaggttcacgccattctcctgcctcagcctccccagtagttgggactacaggtgcctgccacgatgcccagctaattttttttgtatttttagtagagacggggtttcaccgtgttaaccaggatggtctcgatctcctgacctgtgatccacccgcctcggcctcccaaagtgctgagattacaggcgtgagccactgcacccagcatatttggcctcttattccttttctgtccctctagtaatcaataaatgcttgtaaaactgggaaactgctgcctggcccaggcaggattggttggttcaatgactcgctccacagtcattctctgctcattgcctactctgtgcaggctgctgagcctcaggcccgagagcagggaagggccctctacagttaggtggaaaggagcctggactgtcagaaccaggaaaagactgcaggtgccagagagctttggagcacagcgcagcccaaactaagggactagtttcaagaatctcctaagaactcccctaggctagaaagtgttgtttacccaaatcttgccatggctagaaatttgagtctagcatctaccttctcacagctccaggtggacctccagaaggaaaaggaagatgtcctaccaagctaacctgtgactagatatctgttagggtgtgaaacctgtgaacatatccacgtcttttcctttgtgttcatttccttttctcttcctttttaaagtaaaacatccttttgaaaagttccaactttgcctttgctgaactcctagcaagtacttttccccaccttggctagtgagatgttgagacatgggcacacctgagggtggtgtggtcactgtggccgccagccagcccaaggccttgggaaagcctggtgagcagaaaacccaggcagaaaggagtctgggtgactgtgagcattgatccctttgttcctgagtcatctcttttgagcacatttgaaaccattttccatacccaaatcaacataatcttggtgattccaggccacctgtatctccttgtatggctccaaatattaccagggcaatgacgacaacttaattcttcttgagttagatcttcagggccaaggcacagtacatgtttattttggagagagacaaactttcacccacttgaatttctttgcctccaaaattagcgttgggatgaccacagggttctgtgtttcttggcttttatcttgccaaacggattgtaaatgctcccgagtcaccttctctttttttgtgtccctggcaaagcctacctccacatggggttcagaggagctctcaagtctctaggagtttgaaagacttttctagatctttctctgatgtgtgtgacctaggacaggtaatttaacctttctttctttaacccctttcctaagtggggttagacatatttgctgctttctcagagtactattatgagtttgaaatgagctagagtttcataaaaccatgcatttttaaagtctattatattttaaaaatcacttttgcaactattatctcaatagaactttgaaaagtttaaagggcagaccttcaaggcatcattattaacaagcacagcaatataatcattaggcacattattgcctgttgatgtgatttggctgcagttggaaggcagccttaggaaaagctaggggactcttgctctcaggcctttaaatttcttacctggctgggattttcagaattattagtttttactaataatgatttttgggtatcagttctatttttgcccataccctgagatgtgaggaaatctgattatacccaagagaccaaggacacttccaggattctagataaagggtctgaccagttatgctcctttctacatctggcctgtttttccctcccctgtggagatggaggtggtttgtgcaagatgtgattctgtcgagaatgggaatatcccttcaactcagcacacccaaatctctaaacctaaagagctacatctgtaccatgtctgctcaggtcctacttgttgctttgcatcttatgagcaagacctaattgtgggctcccaaagaaagcagatgacttgcccaaggtctttaagaggtcagacagctactagcagagaaacagagcgaatgttgacacctaaaagataccttgtccttccggtgttactagaagtgggaaaaaggctttgagtgcaaacgcctggctgtgctacatactgaccatgagatgtgacaggccactcagctctggcctctgatccttcatctgtaacatctttgatgcccctaatgcctaagcttgctcatccctcagccccacccatgaggctggccagttaacttctgccttcaggtctcagcttaaatatcacctccctagggaagcattttctcacctcctttagttaacctccctcctgttctgttttgttttgttttagcagtacttcccacatgttgttatttatttatttatttatttatttatttatttttgagacagtgtctcactctgtcgccaggctgcagtgcaatggcgggatctcagctcactgcaacctctacctcccaggttcaagcgattctcccacctcggcttcctgagtagcggggattacaggcacgcaccaccatgccaggctaatatttgtatttttagtagagatggggtttcaccatgttggccaggctggtctcaaactctgacctcaggtgatctgcccgccttggcctcccaaagtgctgggattacaggcatgagccacggtgaccagccccacatgtcataatttatttgcttatcatctgtcacctttgctgccccctagtatgtaagcttcatgaaggcagggaccatgcattacatggttactgccatatcctcagggtttggggcagtgcctacacacaggaggtgctccttaaatgtttgttaagtgaaataatctgaggttgtcaggtctttgtcttcaacgttattatttcttatatttgttcagtgcttaattttttttcaaagctcttgatgtagattgaagcttttgtcatttttgtcatatagacgaaacaactgaggcacaaaaatgtgatcacaaaaccagagagtggcagtgcctacctgaacagctcccagacccagactctttccacagacccatgctgtctctcttggcaccttatttttctgtcgtggtgatgttattgtttgtcttatttggcaatgtttacaccggaggagtagaggccattgtgtgttggtggcgtctggaaatacacaagagagtcccaggagaatgccactgtcggttcttaccacaattagcaattgtcaggtcaggggcagtgattgggtcggtgtcactctctacatggctggctctgcgtgttgaaacaccactgcctgtacctccacagatgccaaagggagtgtgggtcctaggactacagccccatttctacccagccctggctatctctccactcagatctaggtcctttctgttcaggaaaacgtcctgtttgtgtagcctgctagacagcaaaggcaagtgccaatcagctggatgatctctctgggcctcagtttccccatcttcacaatggactagtaagtgggaaccagtcaaaattggctcagagatccccaatagggttctagctccattgtgaaataaatttcaagtggagcctcgtcctgactcctgttttcacatgctcccttagagggaaggaaggtggacgattaaagatgattggtcgggagctggaggaaggaactccccattctccaagaggaggttctgttggaatagaggggcagagacttggaagtcgctgttgggcatggcccaacccacttccatgacagcagcaagaccaccaccctcaagaaggaggtgggctggggtacgagaaggtgggctgcccagtggtttctacaaaaagggatagttgtgcttgcaggaggggtagtgtctccatctcctgatgccagggagaaggaggcaggctgctggggtgacggagagcaccctcaactaggtcacactgcactccctctgtgcctcagtttccacttctgttagatggctgatatgatctctgccctgccagttggattggggcttccaaaatatcaactactgcaaaagaagaggttgtggccactgtgactcatatacatgtacatgaacgtatctgaagttttcagggctgatactgatgtgaggcaacccatgcaggcaacccggaggaactgtgtccctcactctgagacagtgagaacggactgagccggaaagctgatggccgtgagaggagcaggtttgaaaatcactgaatgaagtcatgttgtacagagggggcgggggtgcatactgtgggacggaggtgagtcacagtgcataagtgttggggagtcaccttgaacttgggccagaagagtagaaatattgagacttgggtttatctgcctcacatcaggtacatcaagttctggatggctgcccactggccagagacatgaggtggacggctcccttttgctgccctgggaaggccttctgctggcttcggccccactgagcaaagtctgcttgttcactggagttcacacagactccttgccaggcctgcccagaatcctgtctcctctgacttcctgtgctcttgcataatatttccttgctccctgaatggctggccccagtgcaggagcagctcactcacactgctggaccgagggcaggatgtagagggagggcagggatctgcaaacgtcacccaggggtgctctgggctctgagggtggagggcaagaggggcagagccccctcaaattctttggaagattatagcacaaggggagttgggaaggccctgggaccatgtgcacacacatctatctccatgaattgtctctcctgtaaaattatttttaaagttgctaagttgttttcttctgattataaaaaatatacatgttccccataaaaagtcatagtaaaagaaggcatggagataaaaataaaaatcaccaaaattccatcacccagagataaccactgttaactctttggtgaacatacttttctctatatcatgaatattgatatataattacagaatacgggcatacttctaagatattgtaggttcgttccaggccactacagtaaagtgaatatcacaataaaacgagtcacatgatttttttttgtttcctcgtgcatatgaaagttatgtttatattttagcattatgtctaaaaaacaatgtacataccctttttttttttctttttgagacacagtttcactccgttgcacagactggagtgcaatggggcaatcttagctcactgcaacttccgcctcctgggttcaagcaattctggtgcctcagcacccccgagtagctgggatttacagacatgtgctgccacacccagctaatttttgtgtttttagtagagatggggttttgccatgttggccaggctggtctcgaactactggcctcaaatgatctgcctgcctcagcctcccaaagtgttgggattacaggcatgagccaccgcacctggccaacaatgtctataccttaatttaaaaatattttattgctaaaagaaatgctaacaatcatctgagccttcagtgagtcataatcttcttactgggagaggttcttgcctccatatcggtggctgcagaactgattagtgtgacggttgctgaaggttggggtggctgtggcaattccttgaaatcagacaagaatgaagttttttacatcaatagagtcttcttttcaggaaagactctgcagcatgtgatactgtctgatagcattttacccacagtaaaacttccttcataattggtgtcaatcctctcaaaccctgccactgctttatcaacttagttgatgtaatattctaaatcctttgttgtcatttccacagtgttcacaccatctttaccaggagcaaattccatcttgagaagccacttttcttttctcatctgtaagaagctctgactcatctgttcaagttttatcatgaggttgcaacagttcagtcacatcttcaggctccacttctagttttcttgctatttcttccacatctgcagttacttcctccactaaagtcttgaacccctcaaagtcatccgtgaggtttggaattaacttcttccagactcctgttactgctgatattttgacatcctcccacaaattacaaatgctgttaatggtatctagaatggtgaactcttttcaggtggttttcaatttactttgcccagattcatctaggaatcactatctatggcagctatagccttacaaaatttcttgaataagacttggaagtcagaattactccttgatccatgggcttcagaatggatcttgtgttagcaggcatgaaaacaacattaattttgtgcgtctccatcagggctcttgagtaactaggtgcattgacaacgagcacataaacatatgtgctgtcatccaggttttgttgttccactgatagagcaccaataaagtagatttggcataatttttaagaaccctaggacttacagaatggtaaatgataagtggcttcagcttaaactcaccagctgcattagtccctagtaagagagtcagcctgtcctttgaaactagggattgacttctcccctcttgcagtgaaagtcctagatggcatgttcatccagcataaggctctttcatctacactgaaaatctgtttagtgtagccaccttcatcaatgatcttagctagatcttctaaataactggctgccgcttatgtatcagcacttgctctttcaccttgcatttttatgttatggagatgtcttctttccttaaatgtgacgaaccaacctctgctagcttcatacttttcttaatgcagcttccttaccttgctctgccttcctagaattgaagagagttagggccttgctctggattagactttggcttaagggaatattatgcctggtttgatcttctcactaagcttaatcattccttaacttttgatttaaagtgagagatgtgactcttcctttcattcgaacacatagagcccattgtagagttattaaaattggtctaatttcaatattgttgtgtctcagggaataggaaggattggggagggggagagagagatacacacacacacacacacacacacaaacacacacacgcacacagaggaacaatcactggaccagtcagaacacacacaacatttattaagatcactgtcttatatgggtgcagtttatgcctaaaaacaattacggtggtaacatcaaagatcactgatcgcagatcattataataatagctataataatgaaagtttgaaatattgcaagaatgaccaaaatgtggcacagatatgaagtgagcacatactattggaaaaatggcatggataaacttgcctgacaaaccttcaatttgtaaaaagtgcaatatctgcaaagtgcaataaagtaaggcataataaaacaaggcatgcctgtgtttcttaaccatttaacacgtgtaaaactgtgctaccatttttattaagttcccatattgtttttgtgttgctgagaaagtttttgagtgttgtaccctaacctcttctttcccgtaagctctgtggtttttagttttgcatagtgtggtgatttttaggagctcatatgccatgttgtagcagaactacttgtaaattcacatgacgtgtcttccctaaattcaacattaattattagttattaatagtattaattgtgaagcacaataaaatgaggtatgcctgcattatcatgttacatgctattgtgaaatgcattttctatatagcaatatatcagaactatctcttgctactaagttacaaagatttaatacatagttgtattaagttccacttatagaggtatcatagtgaaacccttattcattgacatgtccaggctcagaaaacaagctataaccagcccaagcttattttcagacctgaaaagcagcatcttttctatatttctgaccaatgtgttatctgaaaagcggcatcttttctatatttctgaccagtgtgttagctatggtgccccagaaatagctgcaaaataaaaggttaagtgccatgtaggcctttctctaggcttagaataattcacttgattacataggaagaggctgcaatgatgacagcttccagggctgggccagaccttaccctgggtaaaatgatcctccagtgtggcccatatgtatgctttgagccaggagctgctagctgggagaacaagtttttcttcagtggtattcctgtgaccaagatttcaaataagctccatttttaattttaattggttattgtcctcctgaaattttatgacacaatctatatctttaaaaaggcactctttcttctttatacagttgttttcatgatgttaaaaactttaaagaaagtatcattcagatttgctgacagttggaagattattttaaaaatccaactagtttagctgaaaaaggtgctatcagtgtttctgtctcatccttggaaattgtatatttttaaggcttgtgattagctttttctcctccattgctgatcgtggttggaagtgtggcatagatttacagtaaactttgatataatggtgattcctctttgttttggagccaggtgcctgcggtatttgcttattttctttgattcatttttaaattgagttgaatgtttgatttaatcagaagtgatagtatgaggctggggatgattgcttgtggttgggaattgcttgtaaagtttactgtttagtcaagacaaatcgtttcctaaagctctctttttcagatttcttgtctatgtgggaaagcatgataatgccagtcagtttaaacatatttaagagttcccaggcatcttcgaacagaaaaatttgcaacaaaatttggcaacggcagaatgcgaggatttttgcctcattttgtttatagttgtctgctcttcaggcaaatgatctattacaacaatctgaataattacagtctctccttcaatttattcaccctggactcctttttctagaattactggccagactcttattacaccaaattccttgactctattcccgaggaatgaggatgggactaggagtaaaagttaaagagagaaactaattgttgcctgcttttcaaagttttcggtgtgtggaaatttgttgattttgtaattgctcccttagttggtcattacccgattctggtagggtacttgccatgtgtacacatttagggagtgcaaagggacagtaagacttaattggtcctgagaattgttgaacaggactttgttgaaatggctacttctgtacaatgcacatggagcagctgttggcatagcaactcctacgtggaaaagtgcacgccgcttgcagatgacttttgcagtgctcagtgttaatttgataaatggcttttctaatagcagtttgtgggctaatggaaagatcgaagcaaaccttcattaacggaaaggagaatagggattttgaagccactgggtgaacacactggacagccagagctaaatctccattttcagctgtgtctctttttcacagcagatatgcttggagtgtggcagatgaaagtaaattaagaaaactgtctgcccgtgccattatcatcttagattttaagcagggagaggttttggagtcctttctattcaagatacttaactttgtgtgagagtttagtttaagagtactgtagaagctttgcattgtgttgtcgttttcctttgctggtagtggtggggttaaggtggttaaatcgttttttattgtggtaaaatatacataacaaaaaatgtttaccattttaactatttttaagcctgcaattcaatggcattaagtacgttcatattgttgggctacaagcaccactgctcaagaactttttcatcatctcaaatggaaactctgtactcattaaataataactctttattccccacatgctccaatccccgataatcactattctactttctctatgaatatgactattccaagtagattgtatatatagacatataaagtatttgtccttttatgtctggcttatttcacttagcataatgttttcaaggttcatccaagttacaacatgtattcaaagttttatttctttttaaggccgaataatatcctattgtgtgtagacactatattttgtttatctggtcttctgtcaagggacatttgagttgtttccacctttgggtgttgtgaatcatggtgaacatggtgtacaatttgagtccctgctttcagtttttttggatatagacctagaagtggaatttctggatcatatggtaattctgtgtttatttttttcaaaaactgctgtactgtcttccatagcagccataccattgtacattttcacgagcaatgcataagagttccagtttcttcatttccctgctaacacttgttattttctgttttttgttttgttttgtttttgtttttagatatcagccatcctagtgggtgtgaagtggtatctcattgtggctttgatttacattttcctaatgatcagtgatttgtctttataaacatattgcctgttccttgccccccaccccacccccgcacccccacaacagcctgtgtgggaatggaaatcactgccccattgtttacacctgtgaggcaaacaaagactatcaacataatgatatttgggagtgaaaggtgtcagggagagaaggatgaaggcaccataaggttattatatataataactggcatataggatatagtacaggcacctcagtagacctattttcagttcgtgctgtggagcatgtgaaactattttaaatagaggcctttgggacttaagtaacttcaactctctgaatgaggtttaaggcaagcttgctgtgggctggatctatcctgtataatccctactgatttgggtgatgtataggtacccttccctgaaattcttccctgagaataattattgttgtcatctactacggaatcctgggcccactttcttccttcttcttgggggaggaaatctcccagacatcttgccaagcatttgcttaagtctttgaaccgctgcactagctaatttctccacctgaaacaatatacaaacccctcctcttctccacccgctaggttcttatgctggcagctcatatttttacaagaaaaagaagttagaatgtattgagcacctgctataagcctggcactttgctagtcactgtgtggcagatgactacatcagtcatgactgataaaacataacttctatccttgtaagtgccgcaggacttatttgtgactcttaacaacaggggttccaaaccttagtgtgcatcagaactgcctggggcttattaaaactcagattactggacctcatccctagaatttcttactcggcccgcaggtctgaggtggagcctgagagtgtgcatttctaacaagttcctagatgatgatgatgttgctcatccctggaccacactatgagaaccactgctttccatcaagcctgtgaaatagatattattcccatttatagatgaggagctgagatgtagagaggccaaatgacttgcctcagttcttgcacacagagccagagcccagatttgaagctgagaggcctcactccaaagcttctgctgtttccattatatcagggatggcaaaggcatagataccacctgtgcttccctcacttagtccacccccacgacaggcaatattaatcaatcacagcacctctgagcccagagatgtcctcggaatctttcacacactgctcctgacagccaaacctacccgtcagtgggagctgaagtttgcaatttctgtactaacctgtatggcctttctaaaatggagacattaccaaggaatcaatctattaacagctgaaaacaaaccttgtgtgagctccagtcttatctgcctaggagggaagagcgtggtagattgcaggctgtgtgaagcacagcactcccatggcgacctcacggatcataactagagtctacactcagcacacaggcaacacagggccgttacccttgaaaagtgtaaaaatctagacgaagttaatgaggagactttttttttaagctgctatattttgtctaattcatatatgctacattttattctaaaaatagttattctactctttggcactaagtttggtgatggatataaaatagtgatcaataaacagttgttaagaaaggaaaaataaagtaggtgccaaaggcaactgtgtccacacctgatgaggtcttttaacaaatggatgggaggaataaacaagactgaattatgtttttatatatcttgcgcacccaacagttcttagcaaggcccgtgggcagtagatgcccaataaatatttatcatacggaactacaaatcttgcttgtgaaagtacaaagcataggtgtatcctggaggtagggaacagtaaccctgagagcagactggtttaaggccatctctggccaaaccaaaacacattacagaggctctctgagtcccaaagtcatccacagattgatgtcttgcttctcttcttatggcataagagactggtagaaaactgaccaaactcatcaagaaagtaatatttttttttcctctgaaaattgtgaattgtatcagatattgccactattatgcccctaggtcacttgctcatctgttttccacagggaagccaaaacagaattttgcaaagatatacatgagtaatcaaaggaaactgactgtattgggtgtgattctcctgtcttctgaaataacccaccatgatcttttgcgtgtttctgccagcccatacaatgtctggtctcaccaccaacaacaaatatttagtctatggctactgtgtatatagggcaacctcttgtctcatttgctgtttgtgcagcttaaaagcaagggcagggtgaattatggtttttttgtttgtttgtttttgagacggagtctcgttctgtagcccaggctggagtgcggtggtgcgatcttggctcactgcaagctccgccttctgggttcatgccattctcctgcctcaccctcctgagtagctgggactacaggcacccgccaccacgcctggctaatttttttgtatttttagtagaaacagagtttcaccacgttagccaggatggtctcgatcttctgaccttgtgatctgcccacctcggcctcccaaggtgctaggattacaggtgtgagccactgcgcccagccctaattatgtttttatatgaattgcacaccccacagttcttagcaaggcccatgggcaatagatgcccaataaatatttatcatccaaaactacaaatcttgcttgtgaaaatacaaagcataggtgcatgctggaggtagggaacagtaaccctgagaacagactggtttaaggccatctctggccaaaccaagacacagttaaagggagcatttatgtccctgtttggctgtgatatgccctatagactggggcaaggctgtggcagcctggccaggatgaaaacgctcatccttgggctgcccctagatgccaaactttttccgtacaagttttcaaggcacattattaaaagcagttacgtaagtggggaactaactgcaccttataaaaggcttaacaggagagacagagtcctccatttggagctgttttgttaaatgttgagaatagagaagtccagaagtggttggtgtttctgctctacactgaaaacgaattgggctggagcccatctcacagcctgcctttctttcttctatctcacccagcttgggcacaggcttttgctatactgttggactgggcagttccccattgatagagatgttgtttaatatttaagtatgttgtgtagctcttaacatcgaaagagaagaaaaaaggtccagtttatctttagggtgagctgacctttccagatggagcagggaaatctcctgaggacaggaccctgggaggaatccacttccctgcttaaaaagcatggtgaggaaggttcccttgggcttgttggatccagtactctccagtgggcagtgctctgtatgttctaggttagagtcttagataatatgggattttaaaaccagtattgtattacattagagtattactgcccttgggaattttttagatagttccttttggggagagaactgttttgtcctatccattgcagatgggagcaagaacatacaaaagagcataaagaaaaattctgccgatgtgggcatttccttgaggctgagggactaggagaggcaccaaagggtgtccttcattcatggtaaaagccctaatagcctcagtgttagaatatcctgtaggcaggcgaaggatgacatgactcactttggtggtgacctcctagtagttcaactgagaatccaggcgggataagatcagtgcagggtaattgtatggtagctagtcaacctttccattgcttagccggagaattctggcttttgtgctggtgatgtcaggcaggtgttggaggaggagttccatgaccattttctctgttcctgccaacaggaaagctccattgggacatacacgctcacttccagggtgttttatattcatccatagctgctgcatggataaaaaatttggcgaaaaacttgaaatcctattaccatgatgatcattagaactcatgttagggctttttgtttttaaaacagggacacaaagaagaaacagaaggctgccatatgcaaggttagtgaaagccccttaccttcaccccatttaaatcctgaagagggaaagtagctaagctgtagtgatcacttcctgcaaagaaaaccataattatggcgcccagttattcttcataaggggaaaccttggaatagcatgggtgctattttgaatatttgagaaaacagtgacattcaatatgaaatggaaatgattctgtgctgctgggattggatcagttccttctaggcatcagttgcccctggggatagcctagttctccctcctgtgtgaatttgggaaacactagaatcttgtagttgttgctgactctcccaccagcagggaaccaacttatgctcttgggagaagcagggggagtggggaatctgcttttctctttaagcttccaatctcaactgcctaataacaagggaattcgactatcaagatttcctggagtggcttaagtatgggcgccaggatgcagtcttctgtacacagtgaaagaaaacgggggtaaaaaccatgatgaataggtgcagagaggagtggctagatcacctgcctgggggatgagcctcccacgtgactgtaaggttgtgcaagaattgggcaacatttggtcagggtggagaggccttgacaaagcatttgtactcccactagattcctatctcctccgtggggaaaaacaagtatttaaagttctacacagtgttttaagaggaagaaatggattgccttactaccctagcatacttcatttgtacatatttggagttctattcactaagcacccactgtaggaagggcactgggctgaagatcccagaaaattaaaggagacacctttgttcctgcccataggaaatatagtctagtgggggccaggaaggggtaagacgagcatacaggtgatcatactcaagacaggagatagtaaataccctgatatggaaatagggaaaatggttctaggggttttggagaggagaagtgagagggaggcggtaagcctgcaggccctggagccagactgcctgggttccagtccgagatttaccacctatgagttgtggtatcttggagaagtcacttaaacacattgtacctctgattcttcaactgcaaaatgtaggtcactgttgtacctatgtcagtagataatggtttactgcccataaacattggtctcagcttcaggaccagcaggggccgtgctgaccttgagctagtgacttacaacctccaggtctcagtttcctcatctgtacaatgaagagattagactggataaatgctaacattttctttattctaaagtgccgtgatttcatggttgaatatgtattaaatgcctgctgtgtgcccaatattgtgttggcataatgaaaaagagaaaaagtaggatatgtggtccctggcctcaaggagctataatctaagtgaggagaggacattaatatacaggagagtattagagaattagagaatattagaaattaaaagctaggtggtatgggcagtgagaacataggaatagagattttagaatggaccagagtagtcaggagatttgatagtgacctatctaatgtttagaaccacagagactttagacaggagctcagacttgtttacaaatcccatgaattctgaagcttggaacactgccattaatatttaaattaaagttgaactgcagaaaaacaaaagttacctatttggaatataaggtgggacaaagtttataaaactccatgtctaaaaccggtagtgtggatggaagctataaagaggctcaaaccagcttcccatatatccttggatgacaattccattagaatatagcccctggcacagagtaggcacacacaaaaattcatctgttgagtgacttgtggaaaaagtgttctgccctgttcagctttgaacagctgtgggcaccctggtggtggtctcagccccacctccagagggcagtgcacagaggaggccccgccagagccctcctgccaagtctttgggaagagcttaatattgcctcatgcctcctgagccagccctctatcaaaggtgaattctctgctcccaaatgttaacctacctccgggggggctacacgtactccctccccagaattgtctgaacttaggttttgagaaaacttggcaacagcctcaaatttttcttccagtctaactatcctatggtccccagggtccatatgcagatcgggctgttagtgaccctggcttacacgggtaaaaaagagacttaacaaaacttggcagagactgctaagtgccaaaagagtggtgtagacagtaagtgaggtcaccccggccaggaaattgggggcacctcctggaaggagggagagctaggagcttgagtgggtcttgaagaatgagtagaggccacgatggcaggtaagacaggtggaggcattaagtacttctgtccccatgaccagttcccccataccactcttcgttaaccaaacatgggaggtggcaggcccatttagatctggtgctttattctaagggaggaaatgagatgaaaatgacagatgaagtgcaagcttgaactccctggcctcaaccagtcactgagaatggctgcccatcccccaaacagtcagtgatggcctggtttgatgggcccgtttatgacctcctggcttgagagcagcagaccacaaaccttcacagagctctctgttgaatttccttcccagtacagaacccagaagtcctagttataaatgtcactacactttatttatgtagcatcctctgtgaaaacatgagtatatatcatatctaccatcagaacgtaccttcagcaatcacttagaacagtggggaggacagatggggtcttcaaggttcagaaaggtgaaatgtacaatatcttcccattgtaactcttcagagcaaatcagaggtgaaaatgttcagaacacaagtctgccttccaggccagtcttctaagcacctttttcttctctttcacattttacccttgtctcattccctgttccctcctcctttttgttcataaaaaaaattatttttttccaaataagcaaaatggagtcaaactttgcatcctcaaaatgtatgaagtaaacattattcctaatgagcctctgggaaagtgctcacctttgaacttggccaaggattatgcagcaaagaaaaagtcttaagaacttgatagagtgttagagcttcctgggtttttaaagtcaagttgcatattacatttcttttccttaataggggcatttccagaaacccttcctggttgagtaggccagtgtctgaaagtgaagcgctaggattggttactgactctggttcagggattgtcatctgggtgcgaggcaaccacagggtaggaggcaccattgctagaatgctctttctttcctaggactcagcacctatgccgacagtccttgcaagacaggaggggaacgtgtaggctatcctatttatggtaaggggaggcctatggaaaaacaggaagatggtcaagggaagctggcagcaaaaaggcaatgagaccgaggagttgtccctgtaagataagctcttttccccttggagaccttgcctattaattggcctgtgctcatctctataggctttctattaaaacacacacacggccaggcgtggtggctcgcgcctgtaatcccagcactttaggaggccgaggcgggtggatcatgaggtcaggagtccgagactagcctggccgagatagtgaaaccccgtctctactaaaaatacacaatttagccaggtgcagtggtgggcacctgtaatcccagctacttgggaggctgaggcgggagaatcgcttgaacccgggaggcggaagttgcagtgagccgagatcacaccactgcactctgggtgacagagcaagactccatctcaaaacaagcaaacagacaaacaaaacacacacacacatccttcttaaagacaaaaacacctctggctgtctgcatagcttctgcctgcctctgtggaatattacacattttaaattccccaactattgcctcacagccaagaagttcacttataggcattgagatgaatcattcacagaatgacttaaatccaactaagaatgtgtaactgctgaacattctgattgaggttccagaccgtttgtgatgccacatgtttgttgtaacaggcagaatcatcagtaatactttgtttctcttttcttgaaactttccctccaagtttccatcttaatgctttaaatcatgacagaatcaaacaagctctgtgccctctgcccctgacccccgtgatggcatgagcttcaccaagcacccccattcccacagagatctgggataaaaggctttacagaatccagaatccagctccgtttctgagctgttatcgcttcatagcacaggctgtctttttctcttcctacacgtagagctaggcacacatagatgggtagtgcactgtccctgaactgaggctctctcaagtccaggctaccttctgcccagcacctacttagtgtagcttatcttttaaaataagccatcctgcaaagagcagggttcccagtggccttgaggtttgtcagaacttctctagaattggcaacttagctgtgacctcagaagtcttggctctggcaaagcaaggtctttgcgctaaaacaggctcagtgcccatggagataatcacctcttgtaatatccacacaatcatctcattgtcaaagcacaaggaatgcaaaaatagaagaaatgccacaatagggttgccccatggttcagctaaaccaggattctgcttccggctgagggcaccttgggacaccttaggagggatggtcccaagcattgttctggagttcagcccctgttggcaagacctgtcctcctacaaccatagcctcacggggcctgattttgccccatctttttgggactcctttaccacctccttgtcctggctaactctcctttgtccttaaattcacaactggggaaacccttgaggagtctttttttttttcctccccattttgggttatgtcatctttcttgctcccagagcacttgctcctgacttctgtagcaatggcctcaacactattgagtgtgtagtatttcttaggcatggttctctgcatacatgtatatattatttattcctcacagaggctctgtaaggcaggcactcatagacgctgaggtttagagaaacttaagtaacttgccccaggtcatagagtaagtgtccaagtcctcaagcccgggcagtcctgctgcatctgcatggcacatgcgcttggcctggtctgctcagtgtgtctccctgactgggctgtcagttcctggagggtagggatctgtcttcccttctctatccccagtgcctggcatgtagtagacactcagtaactgtcaaataaatgaaagccctggctcatcaaacaaagaccagatgtgatttaaattccaaggagccatacttcttacaaaaatgctaaaatgccaagaagtactttttcattaaaacaaaacaaaactgttttagctatgtaagggtggccttttagaactctgactgctttagatctttcctctaggtggcatagagttgtggggtttggcagaccaccatgggaaaagaacagatgcatttgtcagaatctctgtggccatcagacgtcactccaatgaagccaaagctccgaggtttaaaaataattaagggaaataactaagcggagagacagaaaagaccacttcttagttgattctggaaaaatgaaccttttctttctaccaaccggcaccgaaattcagagtatcctggacacagctgagagactactcagggagagccactgcagtcacaccccacctccacttaggtctccctacactcactctaatcttctaaatcgtttaatcagacacggcgctgcctctgaggcttcaggactttcaggctgtttttttttccccgggcttaaagtctttctctgctgctgactcacatgttaattattgctttgcataaagtagaattagcagtgctcctgcactcacctgcctgcgtgttatacaactgttttatctgctggacagaactgagtgtgcaggccggcctgccatggtgtcaccagcggccctgtcttcagctgccagggcaatgagcatcgcacagaaaccaaccattgctttagaggctctggggaagaggctgtggggtgtgctctgcttgtcccaggaaaaagagggttaagtgccaagttttgaccaaaatcttataagaatggtccaggagtttcagttccctgtcacctgtcagtgttaatggacagaactggtgtttcacagaaaaaaaaaaaaaaatacgtgtgtgtgtgtgtgtgtgtgtgtgtgtgtgtgtgtgtgtgtatcaacttgttttctctttggctgctgggctggataatgaagtaaagatgacattatctctaataaaagtgatttgcagaaatcactgacgggacctcagtagcagagattcgccattagcaggctagccagataagaggggcagctgggttctgttaaccccctcctcgtctgatgtgtgtcttgcagggaagtcaaaggcggaggagtagagtagagtggactttttgaagtttgggctaatggacagtgttttttccaaagtgtgggctgttctttagccccacttgctgatctttagggatgtcattaggttttcatttttgttttgtttcttaggatttttgtgttagtggctttttccccctggggcttggcccattttctcacctctatgttatatcaccagaagggtggaaccctggccaagccctggcatcctctgccagaaatctgagtccaagcagggcacctacacatgtgaggtgagggctctgggccacgggtgttgggcaacagattgttctgtagtgtcgaggaggtgggatctgaggcagaaacctccctggcctcttaaggatgggacgggtcaggaggggaggggtctgcccttgtccggacttgttcacctgtgtcagtgagagctgactagcagctggctcacgaaacacacccatgatgtggacagcgggcacagccagctacttctgtgtgaaaacatccttagtatacagggatttgtttcctggggacagtgaggagtcatggggtgttaagcaacctagtgatgaatatagccaccatcactcgcctttattaatccactttctactggaagcactaaagcattggaactctgcaatacccccacagctgggggaccgtgactgatttaatcttcatgccagctcaccataccataactgaaagggctgtatgacactattattgttggagtaaggtactttgatacatgagaggtttgacattttgcctgtgccctcagagaaccttaaaactaggactaacaaggtgacggtgccttgcagtcaagtagcacagattgtctaagtgttccaggcaggagtgaggaggagacaccagtgtaggctcggtaagatgctcagaaaagcctctgtggaggtggcaggcctatgttggctctcaaactttagggtttagaaggtcagaaaggaagaagcacttcaggtggaacaaatcaactggggacatggctgggcagcagaaaggggtgcggagtttgggggtggcagggcatagtgtggtctggctggagtaagcgtggagctacaggatcgtaggagctaagtttggaaagggctgggagacctcaaggagcacgtccagcttggacttcatcatgaggatggtggggagcaattttcattttaaaatgggggagcgacaagctgaaaatggttttggggaaagagtggtgggctggcgagctgttccttgccccaagatctgactcaaattttattcttggtcagtggtaaagaaagtgaggggcaagggaaacaaacagaagatggggactaaggtctgtggaaataaataaaacaccaccagagccagaggaggcgtgtgccctgggtgaagtttgtttttcatcccatgggtaacatttatgagttactgttcagcaagaatgccttgcggaggtctctgtggactgagctgaggctccagcctgtggcagcccaggaattgctgccatatttagagcttccaacagagggtttcattttccttggctttggtgccaagaaaagaggggttctcacacttgctgtccagcagggccaaagcatgaccagcaggaggagcatggaggttgggttctggcactgcccaccacctggcacctcagccactaatcagacaacaggctaggcaattatccgggcatctgactttagctacctgtccttttgtttaaagccctttcgtgtgcttggcaccttatggatactcaacaaggtctgtttaatgaatgcgttctccccacccagattctcaatgccttgctccctgttctctagcctgtctcccgaccactggcacctctgcccattcccagtgtgtctttgtcatccctctgccatcctgattgcctccctgtatcctgctcttctttcaaagccaacctccagcagagttctccctgtcttctccagccttgcaggctttctcctcccaaactcctacagccctgactgttcagcccattcttcaggacttggctcttcacctctctgcaagctccctgaggtcaggcatagttgttccacatttcattctactgctcacagccccatcgtaggaagagagaatcattaatatatattgaatgagcagagggaataagccattgctgggggaaaaatacagttttatttcccaaattgctcaatgttatttgagagcatgataataaatttggaaaagacttttagcatttcctgtggcttttgatgacttctttacaaaggaatggaaatgtgcgcagacatctcacttctcatcagagcaagagagggcagaattgggggaaagcaagtgttcgcgctgtggcatgaatcagatcccacaatactagacatgtgaccatgtgaacaggcctcagatcaggattctttataaaggaagcccaggacagattctctaccagctctctcctctttcacttttcctttttctttgctttcctttttttaatagggaggggagaaggggttatgaggatgggggtaggagagtgagggatcccgtgctttctcccccttctcttgctgttttgaaatactttaaattccaggaaccagaagttctggcaacatgttgggattagtaaggcagatcctaggatatttcactattagcatgtgatcaagcatcagtcctgattaaaagtctaaacaaatgttttctttgaaattaaagtgtctgaaataaagaagagagaactgacccttaaaatcatattctgtacttgaaaagagttctgacaactgtctgtcccggttatgtgcacccccgccccccacccgcctttttccatccagaatgtttgacgacactgccaggggaatttctgccccctccttcctgtatatacccagtgctggcctctgaggcagtccagctctgttttctcatgacacagtgattatttttggcattgcagatattttttctaatgttattacccagcccccttcttggttgccttttgtggagcaatcttttgggtaactccctgtaaatttgagggttaattttagttcggtgtggtagaggaggcagtgggagagaggaggaacgacttctactccgaagcgccccacccccaccttaagaggagccggagaggtcctctcacgccctgctcatgaaagagcttgctttcaccagctctgtgctcaccattcatcctttctgccggcgggcttgaggatatggatatccagaggtgacgctgggggctgcacctcggggatggcatcttaatgacttgacttggcgggtgttagaacagccccattcagagtgagttcactccctgcgcagttggctcactcggcctctgtccatagagttctcttgttcacgctgcaggaggaaatggagatttccaagtgggaaggagccttcccgatgctttaactcttcactgaagggaagaggagctgcagagagcgaaataaaatctaagccgccccagctgcagcgcctgggagaggagcaaggctgggctggggatggaggccaaggcagctgggatcactttttctttcctccttgagagggaaaggaaaagagcaaagggcatttttgattgtctttcacaatcagcaaatatttacccagtttgtctgccctagcccaggttccactgaaggatacacgaaagtggaagatgttgtgtctgtgcccttcccctggtacttacagcacagttataggagtagaacgtttgcatagaaaagccaccaagacagggaggcctttaataagggcctatgagtagtgtgggcaggaagtaccctggagaatgttgctaaggggccagggacactgctggaagaagtagggcttgggctggtcctaaggggtgggttttgaagaaataggaaggaataaaatgatacaggtagggaagacttgaaggaggagagggacattaatgtagggcttagtaaaatcccataaagaaagctacaaagagaacaggattcttcctggccagagagaagattggacttgttggactttacgtgcctcagattaggatggcagcaggcagcactaaccctgccagatggcatcttcagtctcaagatcgcacgtgttcctgggtctctttctactcaaagtgtgaggtcacagactagtagaatcagcatcctctgagggttgttaggaaggcagaatcccaggcttcagcccagatcctactgagcctgcactgtaacaagatccctgggtgattcctggccacagcaaaggttgggaagtgctgctctgggtgactccacaggcagctgtcagcagcactagttcagaccccagatttgattcacagaggtgacaaaacaccaacagacacacacaccttgagtgtccgcagggtgactcttcccagatggaaaccgtctattctaattaagagccgggttagaattcttaggaaagatctagaacagtgagcagctttgaggaatccacagaactgaagtcattgacgtggtttttatccgatgtctccagtttgtaccactttgtactactgatgctttagaggacaccaaaagaacaggtgtggggttctttccctgaagagtatgtggtctagttagggagacagaagccacagaagtgaaatcaaggagagcaacacagggccaaatcgtgcgtgtgtaacctctgaaatgggacttggaggagaagtcagtgcaggtgaggctttcctagggaaacggatgcatgggagatcttgaaatatgagcctaattcagacaggcctgggagatggagagagtatattccaggcagggagtgggaggggcagcagcagtagctaagtcccccctagagactgaagtggggcgggaaactgctccccacttgccccacggagtttgcttcatgccgaggaatccgttttacatctcaggccttttcttcttgattcaaccgccgtgcaatttctttgtcaattttcttagctgaaggcagtgttgtaggaacaggatggcagcacaggcagaagggtttgagccaaaccacagatggtgttgttggaagcttgtgagatccaaaggaagaaggctgctgatgggtagaagccctaaggaaaaaaatctaaatcagatctggtaacagcctgggtgtggggaaataccttcaagcccagagaggtggcaccaaagaaaacagtctggtgagaaggaaacaacctgtggcagctgtagactccgcaagcaaagcacaaaccttttttttttctttttcttttaaagacagacttctccaagctgagaactatcccaagggggctggtgtgccagctgaggggctggcctcaggcaaaatggtggccagcgtgtctcactttgctgcttcccagaccaagtgtatgtttcaaaaagctcatcagatttagtatcctagaaggcttcaccctcaagatgcccagctcagctaaatcttttgaacctgagggacttgcttattggccttgtagggaaggtcacccaattacaatcaagaatatgggatttagggtcaaatgatccaggtttgagtgctggctccatcactgggtgatggctgggcatgccactaacatccttggggtctgtctccttatgtgtaaaatgggagtgatacacctgctctgcaagattgattcaggattaaacagaagcaatatgctgagagttctttactaactggaaagagtcacatgtggttgtttcctagttatatagtcagtatctcagcttgcggaggttaattagtcccttagctgaaggctgcatggtgtcaggggtcgggcagtggcagacatcagaggccacagagagcaatggagagccacgcaaatgcctcctgcacccgctggctttctccctgctttttcatgagtgaagacagcaccgagtcttctctatacatccctgcagtggataagatgaggggtgggaaagatggaaagaacactttatttttacagtgggggaagaggtcctgctcatcagcaagggtggccctcttctcagaactggattagagtcaaaggaagccaccagttttagcacagctggtcttctcttcagatgctttgacctgcgtatgcatgaggaagagaagcagcctagagagagctggccatgggaaaaggaggctgagcctggttccaaggctgagactgttgcatgttctgtcttccttccctctgatactgccctctgaagcaccgtgacccatgctttgtgctcagtaatgctggctgtggtcctgaggatgccagtgtagccaaatctgccaactcagctttcatggggtgggggtggggtcactgtgaggtggctacggggagctggcagcaagctggatacatatcttttattgtaagaagtaagcaatacctgatgccaaggtagttgtcatggcattatttataacagctaaaaattagaaaccataacgaaaagcaataagggaatagtaaaatgcattgtggttcagccacatgatgtgatattgctggctattatgaatattttgaaagaattcttaatgggatatcctgttaagtaaaaagagcaaagtattaatttataaatccaatgagatctcagctcgttttcttcatacctttttgtatttttgaagttgcttatactaaatatgcattacccttatcttcaccacggcatttttaaaaaggaaattatgtgttgggaaaagctaggttatatgatggacagataatgaaggtctgtttctaatcgtgccacatggccagtgctgcttgtcagcaggcgctctgttcacagggccttgaaaaagccagaactcggggcttttgttccagttccacatactcccattacctttctaaacctcagtttttccttatctctaaaatgggaatgatggtagctgctcttcctagcctactgtgtgaaatttacaaatttagttacagatttccagattcactcacgagtgttttagactgtagtgtgtgatccaaatgtaaagtggtattattcactaatatgtagaataaagaatgccccactgtcttagcccatttgggcagctacaacaagataccgtaaactgagtggcttataaacaacagagtttcatttctcatggttctggatgctgggaagtccagtgtccaggtgccagcagattcagtgtctggtaagggcccactttctggttcatagctgtgtctccacatggtggaaggggtgagagggttcccctgggcctcctttgcgagtgcactaatcccattcatgaggacttcactgtcatgagttaatcacctcccaacggttccaccttcagataccatcacattgggagtggggatttcaacataagtattttgaggggacgtaaacattcagaccttggcacccactaaggcttgggcttgatgaagctaagcacagggacagttcattatgattattcctgtgtacacacagcttttcccagctgggctggggagtccacgtgtcctccggttacgtaaggagctgggttatctggagccccagatgggctgcttagtaatcgaatctgctgctcttttctacaaggctgcctggggctgagaaggccagaagataagtatctccagtcaacccaagcagaattgaccattagagggccatgctgggtgagccccagacattactgtcagcgctgaatgcagtccaggccctctgctccagggacacagaccgttagagtaggtcagagagctggaggctcagccccagcggagcggaggttgggaggctgaggtatgagatgctttccaggattcctctttcagggaagtggcaagtgaaagcatttgtccctgttttaaccactccagtctcatgtcttctctcttctttgtcccctcttgtagacttttgatatactagtgtggattattagtcttatctcccagatgggctgtggtctctttcaggatagagaccatgcccctcaggagaggtgtgtgtattaaagcatattaatgccttttttctcttgtcaaagtctgtctgatctggccagctcctcctgaatttgctaatttaatattttccattctgaatttgtaactttttgttgttttgctttgagatgggttctcactctgtcacctgagctggagtgcagtggtgcatggctcactgcagcctcgagctcccaggtcaagggatcctcctgcctcagcctcttgagtagctgggaccaccggtgtgtgccaccgtgcccagctaatttctaacttttttagagatggggtcttgctgtgttgcccagctggtctcaaactcctgggctcaagcaatcctcctgcctcagtctcccaaagtgctgtgattataggcatgagtcactgtgcctggcctattttctgttttcactatctaacattgatacctttcctccctttgtgatagattcccctactgatccctgcagcctttggacatcagaatgtacctagaacactgaccactggaacactgccttcatctcaaacatttttgtcactcctttggaatggccctcacagccaagaccattcttttcaataccttcaattgtggcaaagtcttatcttttgagggcacattttatcctatcaaacaaccacaatccatccacagctaagtctggtgactaacggggtgggtaaactggataatattgtttggggtttgaaatgaggtgtgtcctttgaagagttgtgactgattttcttatgtggctctgaagttaattctaaaagacttcccaaaagacagagcgatggccacctaccagcataaagttataggcttctcccaaggtggcttctttgaagggtagccaccttctgtgtggcatctatttcacatgtctcattattttcatctccctcttcctattagccatagcatctggtacagtggtgatcacaccaactcctagataaatgactgtttggcttatgatggtgacttcaaatttgctggacacagtgaatatggacacagtgcatggtagagggaaagagtgtggttaggttttggaagtggacctgggcgtcagtcttccatagacacatgatcacaggcctggaaatctatgttttcataagtcctccaggtgattctgatgcaagctaaaattgagacccacggctctgcaaaactggggccaataacactgcatcatttaagtgaggatcaaatgagaccatttattaaatgcatctggccccagtgctcaataaatatgtttccttttcatcctactctttgagaaaggtgacatagctgtttgcatctccaaaaacatttaagtccaaccccatctgcctccccccaccacacacacacccacccatccatccttcctttaaaaactggctgctttggaaccgtggtcctcagccctggctacacgtggggagcttttaaaactcccattgcccagcctgcacctgagacctattaaatctgaatctctggggatagagcccaggcatctgttttttaaggttcctctggtgactccagtgagcagcaaaactgagaaccaccgactttggttctgccccagttaagtatggggaccagtgactctttctcatctctggaacctggagctgggtgtgtttctcctatcaggcagcccctgtacagcagccacaagcctcatagaagtgtcactagacctctcccaattgcatttgacctttatttcctccattctcagcttcttgcaaattggctccagcttggaatttcaccaccaaccaatagactgatcccagctggcttaattagcctcagtcatctctttacctgctgaaatccattctgtttctaagccatttaaccttatagggtaataggcatattgttttgatacctgaatggccacaggcattaggcatgtgagtcctaatcactctaaaagtctagctaattaggcagccaacccctctgtgttactggtgacagacatcttggggcctcactccaggctgtgttcatatggaagtcaggaaccaagatcatcttgaccaagagcagatcatccttagattcatgacctaagtagcgatccctaagccatgctcggagcaatgacctaaaagttaagatgtttttaagataacgaagctctgggcaaagaggtttttcctggatgaactgtagcatatctctgctgacaatttttggacatttcagttttgttttatcttttgactggctgcctggtgcttaagtggttgttaactttagctgggatcaaacgtttcagaatgtgagtttccacctcggggagagtaactataaatttgtgcatatgaaaatgtccagggggaaaaaaaacaaacccaaaacaaacccaaaacaaaaagaaacacctttttctccacctgcggcatagatagatactgtggcagggttggacctgctgcttttatggaacactgcagagccacatctgataacattcccccaccctcccagcactactgtgaccggcacctgtgtctgctaaggcccacagcacttagtcccttcttcccccgccgaccccatctgaactctgatgctggttcttagtcctactcttaacattccaggtgttctcctaaggtgaatgggtgcacacttaaagacatgaggctcccctcatgaaatttttgtcactgtatttaaaaaagtattagcccttcttcccaaagtatgtgtgagcatccaggttgtgggaaagtatcaacacagcacagggaacatcaaagttgtacagtaaatgatagtctccttgctgccaatggaaaaacttttgatcttggacccagaagaactaggtttgagacaatgtttttagcaaattatttaatctctctaaatctccacatcctcatctattaaatggagatgatagtttctatctctcagggttgtgagaatcaaatgagataacacatgttaagaagaagtgctttctgtaaaggcattattatttgtccttttaggttcagctgaaatcccacctccctgacttttgaaccaagaggctgcctaagattctcaatcttcctttttctggaagctaaggtgttgctgtttctttatttcttgccaaagccactatctcctacagttaagcagtgaaaagagtattcgcctaggaagagcagggttctagccctagctctgccactgattagctgggttgctctaggcaagtaacttacctgctcaagtgtctgtttccagatctgtgaaaggggaacagtgacagtacctgtcttgcctacctcacttggttgcaaggatggaattagatagggatcccctgtgtgtttccggacttctaagtgtctgctcactgactataaacccttaaatggcttatgtaggcattggctttgtgacattgggcaaatgacatattatttctgagcgtcagtttccacatctctaaactgtgtaaacaatacctactttattttgttgttaggaagagtataatgaactaatatatgaaaggttcttgatagagcaccaggcacaaaaagcacagcaagactcatatatcagatgccattgtcagagcattgactccagattgccttttccctacctggcttttcctctctgcctcttcttcgaggaaggggccaatggcagagggaagctttgtgcatgcagatattggcgttaatgccatagcctgtgctgggattgcttttgcttcaggatggcttcccttggcccctgatgacgaggttatgtgttgatgatgcttttgttggagagcacaagggttagtaatgaaatccagcatctttcacctgaccctcctgatccaaaggcatgatgtgtgcggtttcagcatcctgccctcttcccatcttcctttcctgtgccagaatacttgcaattctttaactttttctccacaatcaggtcaggattaaaatgcacgtgggagggactaatataaaaactgccactaaaggtctaatcagggcaagtcctgagaaggtggggaaaggggggtgcaggggtaggtgtcctgaaggttggaagtcagggagagagggaaacagggattagataaaggaagcagagaagggagacatgacgagaaaaatagtttcactcatttcacaatttttctgaaggttcttcttgaccatcaacagctgttggacgattcatcctttaatccgagtatatgatgcttaatccatccacggagctggatagtctgtctttttaaatgaagtatgttgtaaaatcaaaacagtgcttctgccccaaatcttgagggatttgagaggcatgctcacattccatgaatcccaaaatacagattttctgtccaaatagcaggctgcaaagccaaacaaaaggagaagcagcctctgggatctcagatggcaggacagaacgagccagctagagctgattggattgaggccttgaaacctatgaacttcgctggatgcttttttattttatcttatttatatttttatagagacagggtctcactatattgcccgggctggtcttgaactcctgggcccaggtgattctcccatctgggactacaggtccaaatactaccatgcctggcttagatgctttttaaaaaaataaaaaacatacttgtttcttcattaaatacgcaatataggttatttatagaaacacaagaaaatacagataagcattacaaagcaaaacaaaaaccaaaaaaactccctttaacctcactaccatgcaactgctaacatttttgagtagaaggagacaggacagtcattggtggttaagtgccatgattctggggcccaccttcccagtgcaaagcccgacttccccatttacctgctggaggccacaggtaaattacttggcctctatggggcagtttcctcatatgtaaattaggtataataataataataataatgcctacttccaagggcagttgtgtgagtttaaataagccaaggtagtactgcttaaaacagtccttgtaagcactatgtctgtgatacctataataatagttattatgcatctagcctttctcctatataatttataggaagtattatgtataatacatttctgtgaaaatagaattgtcctgtactgttttgtaactttttaactcttatgattgtcttttcatggccatctttttaattagtattagctaacattgattgcttacagttggaacaggcttagtgctaaagattttacataaattatcacatttagtcctcacagttaactctgtagggtaagcactattgttaccattttacagatgaggagactgaggctaagcagtttaaatgatttatttacagagctaacaagcagagaagttagaactccaatctaaacattctggcttttaaatattgcctgtgctagaacttgccatggactttataagaaagtccaggatttctttaggacttctaaaagaggcaggcttcagtgcgtgtcatctttcgttccatcctgcagcaaagaggagaatgaggctgagacagcctggcaacctatgctggcagggcttagagagaaaatgtttgtgcccactcctttttaatccttgacagaacgcacgttggtactctagactgttgggtgtctggctaactgttctggggctgtaatggcattttcagtttttactgtggaaatcactttctggtatgaagcgggatctagggttcagtactactcttaattttttctgattgtgtcttatgcagaaaaagaaccttaaagcagtttttttatcttgttctccagagcccttgacaaagccatctgagccactgatcatagcttccttacccttctctttccatccctggacattcacccctatccccagatattccagggctaggtcccaggcattggtagttaatttaatcagccagtctttgcccagactccacccatgtgaagccctgttctggcctccacagggaatgcaagaggaggactttggttgtgaagacaccaacacacacaaaagcagagctaacaatacaaagcaggttgtgtgtggctcagacaactggtgtgagcccagatcagtctagtaagggagtgtggctgcactgggggttggggccatggggatgtcctggccagaggtatgataggctgacagtaacctttccgggactaaccccttcttctccacttaggagtagctcggagaggaggaaggagaagtcccgggatgctgcgcggtgccggcggagcaaggagacggaggtgttctatgagctggcccatgagctgcctctgccccacagtgtgagctcccatctggacaaggcctccatcatgcgactggcaatcagcttcctgcgaacacacaagctcctctcctcaggtaaggccagcaggctcccctaggctgggcagatgccagccttaccagcatgttcctatatgcaggggacccttctgctgccagagctggaaagtcaccccactacagaactttcacccacagaaacaccatcatgagtgatttattccttcatgttaaacatctctcttccagcagtgacctttaccgtgaatccagctgtgagaggagggcagggacaggaccagggaagaacatgggcacccagaggctgtggagaacacgggctgggagaaccaaggacggcttttgctgacttctcaatttgttgccatctggccataagacccatcctccacactagattgagtccgcaggaagcattctaatccttaacttccagtgccttctccagaacagcaagaaggtgtgcccggatgatcttttccctctgagaagccagttaggccaagtaaatcatttagtctctctgaacattggtttcctcgtgtataaaatggggttaaacatacttcttgcccagggtgtcggtgagaatggactgaaatgatgtccataaagcacctggcctggctgagctcactcacactggggagtccttgacatcacccctccctcggaaaataactggttctcccctccctagcacctctgcaactccaaagttcacaagacatttgctttttctcagttacattcttcaagaaaccatttcctatgcgtcctgaccagaaacaggtgtcttgagtagtcttctggtttcagatcctaggtgacattctcgtcaggggtgtcagttctgtaaggacgctgggcaacgagttgtgctcctccccacctggtctggtgccacaggtggggacagtgtctgacgggtgagcatgagggaggcactcagggagggaaggttcttttgtggttgtttttcagttttccggagtaagcctggtgccttggagacggtggactccgccatcctgttatgaagtggctattctgggaaagagggaatccagtgtgaggctgggaggccagaccagaatgtactattctggtccctgtagtacaggaaggatatgggggacagactttcagaaaataggacgacagctcagtgggcctggggttggagggctaggcctaaagaggcgaaatgtgcagacaagagcaggagagccaagggggaagatatgctccataaatactttcaaagaacaatgcaagacaatggcagatacatgatcctagatgctgcaaagagagaacagtgggctgagccctggcaaggcttggattgctggatataagaaaggctgggagactccatcacagggcatttgtgtacccctccctttaaaaaggcttgtcttactggataactgagggccaagttggctaatgttgcaatcatctttacataaaaagagtagacagtggaggatttaatgactggatggaggccccttccccacagtgagaaccctctcccctgctttcctgctgtggtacttgagattttgctcttagacattaattcctttggattaatcattgcttctttcatcaccactcccaattcctccacccacacaaagccccagaaggggtaatacaggttgagtatcccttatccgaaatgcttgggagcagaagtgcttttgattttttaattttttcagattttggaatgcttgcattgtatttatcagttgagcatccctaacccaaaaatctgaaatttgaaatggtccaatgagcatttcctttgaatgttgtgttggattttggagcatttcagatttcaggttttcagattagggacagtcaacctgtatattaattgtagaatgcctctgactaaatttggactcgttgtgtttctccttatttcacagataagtgaagcacagacaggttaagattgctcaaagtcacacatttagcacatggtgaacctgcacctggaattcaagtccttttgaattttggtccatgggaaaacagacatgggacagcaagagcattttgtaaacctggtcaggcaaagatgctgacaagggctggggtatggggtgtgggggaagggagaaggtaggggaacaaaggtcaacagaagcagctgggggccagcgtgatggggaggaggtcctcacacattcagagagttgtcctgtccttccccctagtgcagggcttcgttttgcatgcttgccctcctgagcctggctgtccatctcagtggttcaaaggttggcctcgaaaaggccacgagttaggctggactccctgagcacatctacctgtgtgtgttctggtgtgagccctcatgtgctgatgggaacccctgtgtgctaaacacacccacagagataggaccagagtggccacagtgggacatcccatatctatcccatctccggagcctgttgaaagttgtggacacaaacttgcctgccctctggctgggctcggccctagaccagctagagcctttagcctgtcagctctggtcctctctgtcccaaggaaagaaatgaaggaaaaggataaaaagtttctacttttggccatgtggtcctgatgtccttgaaggagaaattctcaccaaacgagcacagcccagggaggaggagatggtttctcagcacccgcttttctctgacttctctcccaggctcctgccacacattcgctagactgattgttaagttattttcagaaattgtaagacaagatctttttctttctaaatcgtattttgcttttccaacacatgtagcgttatgaagaggagtacgggatttgtgggcagatagacctgcattggaatcttagtttggctgccttctttctctgcaatgtagtaaaaatttctctttgagctttagtttcctcatctgcacaaagggaataatggtgcttaccctgcaatgttatttggggattgagataacagatataaaaggccttatcctctagcctgccacatattaagctctcaataagttatagcttagaaataaaaattattatgaacaaatatattgatttatattaaatataggcttctggagaaatgatgtaaaagaaaacccagtgtaaattcttactatcctctaacctactttctagcaatttctatcaaaatgcagagtcgtcaaacttttccaaggcaaaacaacccacacattcattatttaagcatttctaacaaaggtgagtaccaattttggctcactttataataggaaatagctggttgcatacctcaaagttcaaaaggctaaaaaataccaggtttttctttagaaaagtttctctttacttagtaacacgtttccctttgattttcacagtaggctgttctgtgtgggaatgttggagaggaaacctcaacgttgagaaattcaggctgtgggtctgggctgccgattgagattcgtatcacaggaagcaaactgaaacaatagctttatgatattagctgccacgctgggctgaggacagaacacactcttacaggaacatcggtggaaatgccacttgattgtcctaaatcctctttcaagatgagccccacaaaccatgagcgaatcagggtcaactctgcattctgagggcattaaaccgcagtgaatatacaaaatttgcttttcattgtaaaactgaattttgggcttgcccaaactcatacatggcgaaatcaaattcattttccatggacctggagatcagcgtgaagcaaggtttctaaagagaagtgtcagttgcattatggattcatcatcatttgcttagcgaagacatcagttataacaagagattatattttcctgatctctagactactaagggaaggatattaaaatgtgagacaagtgattttaaagtttttaaggcttgatatgacctttccatgcaggaaaagtgggacaaagaaagaattgtggaggcagatatatgttctggtaccctctcacaccccactttcagacttcttttcccaggctttcactcctacctccacccctttgtcccacccactccaaatcaaggcctttttctgtcctgtttggaaagaactcaataagctgattcatgtgaggatgttaatgggtgagaacagctaatatacagtctcttctagagatactgactttgttcagatcattcctttaacttaaactaaaaagtctcgtcagtcaacaggtgtttgctgaacccagtcctgtactacatcaagggtaatacagagaggcaagataggatagtaagatacatgcaaagaacaaaggcatgaatctctcctagtggactttcaggactctcagggagcccaggaagatcaggaaggacacagtgccttctgtcaaaggcatcagaggagcccaggcctgctaatggtggcatttaaaggtatggctaaggatccagtaagcgatcccagagtgatttccctgtggcttgactggcactgctcttgcagtctgcacatccgggagggcggggtttgaggggccaggctgtgggtcaggtggaggggaggaatcagtttaggcagagccttagaaggaaggcccctgtggtggtcacaaagtggtaactgccaagcacatctgaaccaggaagaccccatcagaatggctttaagaacagtcagagcagtcctggaacttctcggagtaggaaacaagaggcaaagcgaccttggtggaataaaagtgcagccagcattctgaccagcagcaccgtggggcagcctggtctctgagaccactcaggagcctctgctctgccactctgcctgctctctcccaatgcacagcccctgctgcccaggaagtcccaccccacatgggcggtgctgcctgaaggaaatgagcgttgctccggaaaaagtgctccaaaacctcagcccgcgcatatcctggctgtggggagtcatcaaagcctgtttaccggggctatttttagcattaaagaatcttgttatgctccccaggacgggcatgcactttctcagcagagcacctctggttttaatgagccatctctcgtctttggggtcagaccctgaagggtcctcggaagcaagtaactgagatctggagcccaggatgatttacagacccacttggtggcttattgagcacctactctgggctcctcactttgttctgaccaagagttgatgctggattgtggcatcaccttacagcagtttatctgtcttccccaccagtctgtcgattccgagggaaggaactgcccttacacctttcagtatccctgattctccttaagacaggactgagcacacagtaagtgacacttctggacagattaccttgtgcctagcataaagcagacatgaacacagtagaaacttaataatggtgtagggagcgcgtgcattttcccatgtccgtaacactgagtaggatattaatggtacgtcagggaagacacgatgttcataggggaagaggcagaagggtcttcagcagatttgtgacatgagcctccacggtgaggggctacctcctggctccccagttttcactctcagctccaagctgggagtgacctggccaggttccttcagaagctcccaggagaacaagcaggtgctgtgagggcaactagttccacagagggaagagaccctgtcccggccctgccgtcacagggtccctggggccaacctgctggcttcctggtcctccagccattgtgaccgcagtcccaagacattctgttacccttcgtggccctagattgcccctctccctcccggaggccagctgacccgatgctgctgtagccgatttcgccacctcctggaagcaaatgcactgggcatgggtggaaaccagtttggctgtgttggaactgttaaaaacaggaaattttaagcaggactatttcctctgggactagttaacccaaatagggttgtcttgggattacttcagattttgaagtcagcgttaccactgagatcaaagaaattgaagagaaaatatcttctcggttggctagaaaccacagggttggcctctgtgtatctacagaaggtggtcacctatctggtgtgattgaagtggcgctgaaaacctctcctcactcatctccaaaataagtcaccacctgccagcacagggtaattaaggtcactcgtaggatctttgagttgaggccatagctctcagcatgtggtcctatgagtagcagggtcagcgtcacctgggaactttttagaaaaacagatcctcagttctactgaaccaggaacccagcaggggcccgtccagggccagcttcatgggcgtgcagcacaggcagtcttagagggcgccacacttagaaagttctcaggcttggtttaatttttccaatgagaggtctcacatttttattttgcactgggccacgcaaattatgtagcagtgctggtctcagaaatgtttctttcagcctggcctatagatgattctgatgcatactcaaatttgaaagcactgagttaagtcattttctcccctaaagcccctgttcaaatgaagattttagctgggaaagctaacattcacagtggcatcgcccacacctgggacattgcatcatcgcttcagcgggctgatgagctggcagagaacaggtgtatcagcagaaaccccaagcagggatcaggtgtgcgtatgtgtatggtgtaaggtcattcccatgacctgtggttctcccctctccaggctagccgcctgaaccagggtgtgcagaggaaagaatttcccttgtttcaccattttagcagaacagagggaaagccaccggggcattactctgtacaacccaactcttggctctgaagccttgcccatccccggacaggacccactgtgatcctctgcaaaaggcatctgtgactctggcgtgttctctgatcctgtgtcctgaaagatagctggtcccctttgccttcactgaagcctcttggtaggaagatcttgtaatgtggatttgttcttcttgaggaataacagcaggtaacccaaagcttaaatttagaggctccaggaaaaagataaaagagaaacccagttcccttgcagaaaggcccttgaacgacatttcacagcattgatgtgtccctggccaagtggcccataaattgaattgcattctacattccttagaatagtctccatttggaagactccttttagttcagtgaatgttaatgtttgcaagtgacatattactctcatccacttgttctgtaaatcaagtgaggcatattttgattgatgtttgcactggataaatacaaattttcataagtaaatgtctttggagttaaataatgaactaggagaagagggctgaaataaagtctgtggtttgtgtataacaaccaaaggcctggggcctaagaggttttttttggtctgggacaagagccgagtctatatttttcagatagcagaggtatactagatagggcaggatactcaaagtgtgggtggttcggggtggaagttttcctaggctgcacccagcaaccacctgtacggcctgctgagaatgcagttgcctgctcactctgttttgcacctctgggcttcactctctccaaaccattctgtacgccattgccagactaatctccccaaagcagtgctttgagatgcactcctctgatcacatttgcttgacatgtgaggcccctccaggacactgggcctgcctcaccagcccaatctctgagactgggaaatggattctcttcttcagccagatgggcctctcttcagtcctaggactgaagcttgctccaggtgttttccagtgttcacacaatcccgtctggttcagaaggcccttcttgcattccacagagtgaaatctgttttttctaagactcttcaaatcttctttgcaacagttagttgtctgtgatcaccccaaagcgaccccctcgtcctctgaccccttagagctcttcccatctacacttttccttgggagcccagctatgacacccttgaacttttatttagctttgcatctctgagtgctacatattcctcacctgggatctgagcaatttgagggtagtgcatgtcttggagcagaaagaagaaagaatttactgttcttatagttttaggcactttacgtacttatccttacaattcagagatggaaattgttattcccatttagctgatgaggaaagtgatatccaaagaggttgttacttatccagagtcatagcctaataggaggctgatctaggaatagaacctgtgtttaactccaaagcctatgaatggttgagtgtggcttctggattcagctgtcaaagcttgctagctttgcaatctttatacctttggacaaatggcttaacctctctacacttcatctgtaaaatgagattaagaatagtagctacctcgtcggtcactgtgaagattacatagcatgcttagtgcagtacctttcatgtagtaattgcagtatatattagcagctaaaatttgttcctactactacgactaccattatattcaggcatactttgattgatgtttgcactggataaatacagattttcataagtaaatgtctttggagataaataatgaactaggagaagagggctagagggctgaaataaagtctatggtctgtgtataacagccaaaggcctggggcctaaaaggtttttgtggtctgggacaagagctgagtctataggctgtacaggtggttgctgggggcagcttgggaaaacttccaccctgaaccactcacacagcagctcctactgctctcattactagtgccagaagtactgttgtcacaacaagcacactgtcctcacagctcccgtcagggtgtcctctgtgcagtggtgcctgctgccaggcggaggcagacattcagatggttggcagtatgcgtttccagaaaagtccacccaatgcctttgcaccatccctggcaaatgcctatctgtgccagtcccatctgttttcactccacattcatgcaagctgtcccacccccccccctttccagtttgctctgaaaacgagtccgaagccgaagctgaccagcagatggacaacttgtacctgaaagccttggagggtttcattgccgtggtgacccaagatggcgacatgatctttctgtcagaaaacatcagcaagttcatgggacttacacaggtgacaccctcctctatctctttcaaaagaagaaatgtttccatttgggggtagaaatgagtggaaggtgctagccacaatcccacttgacctctccctgcaaatgcccacggtgaccctcgctgacctcaggccacacgcctcaggccacgctcccacccccaagcattgggtttggctttgctcatgtccatcctggtagacagctctctactgactcattaacagaccaagtctctgtcatcatcagtagtccccgattacatctttctgtctgtggacctgacactggactgggattatgagaaaacccaattcagtctcctccctgcctccaaatctggaaggtggctcagcttactcttggagtcttttacttcactgttaggaataatgatgcctaaccttgtttttgaaacaggtggagctaacaggacatagtatctttgacttcactcatccctgcgaccatgaggagattcgtgagaacctgagtctcaaaaatggtatccttaattgtgtttacttccttcttgcccccactgggtgggaatctgcctcccctttgtctacgggtataagggagatagctcatggcccttgtgatgcaggaaaaatggatgtccttaaaaaatttaagtatgtagcctgtgagatgagattggggcattgagaggatccagtactcagaaatatctcctgctggccctgcatggtgcctggtgtcccactactaggggacacctttgggttaggacactgtctctaggaggtttcatcacccaagagtcaagcatctctgccaaatgacaccacccaaaccaatgaggaactagtctgtgccaaagtgctcatagtaactactgtagttatctattgctgtctaacaaaccacctataacatagggctttgatgattatctcccagggttctgtgggttcagtgggtgggtcttgtactccatgtgatgtcagctgggctgcagtcatctgggggccagactaggctggggtgatcaggatagctcacacacgtctgggaccttgtggcaggtggctggaaccctggactcagttggcatgctgggacaacaggactgttctctcactctatggagactcagagactctccctctccatatggtgtctctagggtagccagacatcttacgtggcagtttagggctcccagaagcactaaagtggaagctgccaggccttctgaaggctttgtccccagattggcagagcatcacttctgccccatcttgttggttagagcatgttacaggccagccctggctcattgtgggaggaaactacacgaagccatgagtgtcaaaaggcatggcttgttggagctacttttggagaagagctaccacaggaaatggtaccctgatgagacgcaggtcaagtaggttttgatggagaagaggtttaaaaagatgtagcattcaggaccttacccatggggatacccagcaggtgccagtagatgagaggacccacacaggcagaaagcacgttgcaatggttgcaatggcagtggagcttcctgtcttgtaactgtggccattcaacaaaggcatgaatagggacattgttaagaggactgaagctttggtcagaattggggcttaatgactgtcaaggtcccttccaaacctgagattctgtcactggtctggggagattctgtgcatgtctagatgtcctctttaacaacctcacctgtcactgccatggggcttgtgcttgtccagcctgaataacagaggcagtgaggctaagcctacaaggtttggctcttattaccacacacgctgcaaaaacagacacttcattggctcacctccaccctattacagactgagtctgcagtccacatttgggcctgcaaagtacagaatcacaaccacctcctcttctaccactgccacagctccctcacccagctcctctgctctctcttctgcaggccttagaccacctgggtcctagggtacactggcagagagcaccctgtaggctgctcagtgtcttgtctggttctgtggggaaagggctaccagactttctaaagctctctaaaaagaggattcatgttctgcatgggtaggtgcttgaagcctgagaaagcctgagaaaaccaaagactgatttcttctgtactccagaaaccctttggcctttgggttcttagtgtcagttcagccactgaccatagtctgagtttgagtctgtgaccagaagcaagtaccctacttctctgttcctcagagtctttcttttcaaattgatggtattggactaggcaaaggcgacaacctttcagttctcaagtgccatgattcacagccaagtgacctctaattatctgagtagaactttagatctcttgatctgcatattgaggacttgggatcagtcaaactcaatgcaacagcaaatcttcactgaaggtgccagcctatgggtggactcgtgatctagacctaaagggttagtgtgagttcctagaggaaaagaaagccatgaggcagattgtggaaggctttgaaggccaggtggagggccttgaactttattccatagacaatggggagctattgaaggtttctgtgcaggggtggagtgatctgtgtggagcagtgtttagaaagaatgaacaaggccaggcacggtggctcacgcctgtaatcccaggactttcggaggccaaggtgggtggatcacgagatcaagagatcgagaccatcctggccaacatggtgaaaccccatctctaccaaaaatacaaaaattagctgggcgtggtggcgcgtgcctgtagtcccagctacttgggaggctgaggcaggagaatcacttgaacccaggaggcagaggttgcagtgagccaagatcacgccactgcactccagcctggcgacagagcaagattctgtctcaaaaaaaaaaaaaaaaaaaaaaaagatcaaatgtcagcatggggagaatccagaggttagcaagttaagaggcctcaataataccccagcaacagccacaaatgaatccctccagcccccttatacccaacaactggtctggtcctggtggtggggccagatcccaagatacaggtatatctcattgtatgctaaccccacctctgaaaattaaaatggcaagaatcataatttggtatgggagaaatggttttataatcgtgatgaaggaatgttctctcttttttaaaaaaattcactattcagtctgttactgagtggggtcccctaaggatgttgaagttttgttcaagggtgccacagttcctttgacacataactcttcaggaatatgtcagtcaagatcctctggaagtttaagtgcaggggctggtgactgttcctggaggaaggagtgtgactattcgaaacaaggctctagattgttctatgatgctgggtagggggcaggattatatctttgaaagtaggtaccagagatggtggtgtaggcaggatttagacacagacaagtgggattcagctggcactcttcattactttgttttacaaaaagtggaaaatggttctgaatcgggaggctgtttggcaactataaggaagtaagctatattgctggtcttggtgatttaatttttgctgagagagaggatatgatccaggttgagttaatccataaagtggacttgctcaccaagtccactgtaaggagattcgtaccagagttctctctagagccttgatacatatgtcacttcagggacaaagctaatggcatggtatcctgaacacagctattgcagtttgcaaatggggtacaggaggggttaaattcctcctgagagacaggttataaaggaaagacgggagtgtcggagagacatttctaacctgtgaggaaggcttacacccttggagtaactgtggcctcactcagactgtcccttggaatttctgcgagaagacctgggcctgccccaggaaagggtggctgagttagtggctgataggcagtcgttgtgtcgctgctctgaaggcaccactgaccatgttccagatgcaatgggaaatcaaatgatggagcagctcctcccttgtgggagtttatgctccagttgaggagataagcttgagagtgggaaccattagttcacaggccatgatggagctcagtgttgatggcagaccacaggtgctaagagagcagatatttggaaaatataaacaataggctgccaagaaaaactgcagctgggcccctctcatgaatatccatataaaactgacttcagctggttcttcccatccttccacatccaggctctggttttgggaaaaaaagcaaagacatgtccacagagcgggacttcttcatgaggatgaagtgcacggtcaccaacagaggccgtactgtcaacctcaagtcagccacctggaaggtagggcaacatcaggcctgggttggagtcccaggtgtagggtaacggcggtgcaggggatgcctaaggccctacccccacccccagcactctcggctccatgtctgacccttccacgcctgtctcaggtcttgcactgcacgggccaggtgaaagtctacaacaactgccctcctcacaatagtctgtgtggctacaaggagcccctgctgtcctgcctcatcatcatgtgtgaaccaatccagcacccatcccacatggacatccccctggatagcaagaccttcctgagccgccacagcatggacatgaagttcacctactgtgatgacaggtagggggccatgggtgtgtatgctgtgggcagagatgggtcttacctgtgtgtgtggggagttgtgcctgtattaaaggtgtggaactgaacatagacgtggtattgccgggtgcatgttcgtggacctgtgccactgtttcattgcatcagtgcccctcagaggttcccggtactgtatttggtggtctcccattgacagagcctcagggtccatctgcagagctttcctggtgtgcaactcttctcatcattgtggtgtgaacatatttctccatacgtgtatcaggctcctgaggaaattctcaaggcagtcttctgccccaggagaaagagtctagagacttccatctgtactcctgcttcagaggccagtaaggagcatcagcttctgccctggagactgaccctcttccattactgactgagcctttccctccgccttgttccttcctgcatgcaactccattccggccagtgtccagccattttgaagaagatgaaggtagctgagccagatgctaaccccccagtgccaggcccagtgtctcttaggagacacagtagtgattaagagcatgggcttcaggactagatggcttaggttcaaatttagtaataaatgttcagtgttagctcttattatcacctttattagagttgttgaaagagtgcctaagactgcttaggcatgtcatgccatctcgggttcttagctcatttagaagattgaagcaggtggggaagagactggggttgtcataggagggagtatttagataccctacagctcctaactcccccaccagccctgcctctgggactgtggagcctgatgatgggaggtaggaggaggaagatggggagaacagatgcccggagcaatggccggccccagggagggaaggaaatgcagaagactgggcccagggtaggcctggcttgagtaagcgccactggggcttgctgagcagcaccccccgcatgcgcccttcctggcagagatctccctgcctgacctcagctttctgcagcatctagagccgccatgtgtcccagggtgacagttcctgtggcagctctttgccacccccaactctttgccactcttctctcatcttctagggtttctcctcaggaaaccctcagatctcagtttccccttctccaaaatagagataacactttctaacctgtttcatggggtcactgtaaaatgagataatggctgtgcaagcactttgagaagtccagacaccacaacacatgtgaggcttcttgttattgcttatatcttacttcctgtccttggcctcctccaaagcaaaatcttccactaaactcaaggagctgaaaccacttctgaaggcagttagtggctggggggcaggaagaggaagaatctgacccccagatcagcaagaatctgccttgtcttcctcagctagcaggaaaccatggaaccccaggaaaaaaagctcctgctcagcctcccctaggcctacccacttttctcttatcagctggacatcccaagggcatctggtttcttcatgggagggaccctcctctccaggatggggtttctctcctctgattccagaccggcctggtgttggttggtcgccccttcttagagttggccaccacttgtggcacaatttcagaacttttgtaaaagtatccttgagtcattcctgtccttcagttctgaccacagtagggccaggattcacagcctttggagctagtgggtagttatataagtagaaagaaatgctctaacctcatagggagaaaatgtcatgcatgaagccttccgtcctggaacttcgacacagtcaccatttattgtaattgttagtggtggtggtggtggtggtggtagtggtggtggtggtggtggtggtggtggtggtggtggtggtgataatgatggtggttcaagaagaagattgcacttttagtgacaggcactgcaggaatccatgttataggtaaggttatttatcagatgcagtctttgtattcaggtgaacattctgggcagaagacacagctttgtgtacctcagtagtcttgtgagataacatggacaatcccactgcatagcccctgtgtcactggctttgaggtgaagtggctcaagccgacgtagccatatagcctgggagcatatatagtgctggggatgatgaaagtcagatacgtgcttcaccctggtgaatgaagcacatccgtaacataactccataagcactgggaaaaccctactgtcctagaaaataacttggcatccctacataatagaaaagagattttttttaagcttaagattttgatccttgttacagtgagaagaaatcctctggaaggggtaattcagccttatcctttattcattatcttggtttaaatgagtttcaggtaattttctgaaggtactaacctttggacaaaagaagagggggagaaacacaaggaattggatgtctaaatgtggctggagaggaaatgtacatagaaaggggaaagatgctgtgctgacttcttagtttggctcagggctggtagccagagtagcttctggcttaaaggaagtatcaagcctcgtgatttagggctttgtgactcataatgtagagggtgatattgcttataagttctgcgagacacactgcattttcagcaaaatcttgcctttcaagaaacctaattacatggccccaagtctgaattcagtggtgctggagagctgcatgtagaagcatttaaagacatagaatgctgtgtcacacagaagttgtgtttaaccgattagcagattagttaacaagggcacagacatggcttagacagttgatgaagtgactattttaagtccttaatccctaagtgttatatcttaattgctttgatgaggcctgagatatttttggttttggtagcttgttttgttttcactctttgtggtgggatggggagaagcatatgcacatgcacacatatatacactctccgcctcaattcccctttagagacaaatcctgcaaaaaccaatgcctgtccaagatacctaatggggtgaggggttctccattttaatcaggaaattcactaggtttaatgacatctgagacacacaaggtgctgtgattcccacaaaggggattgttttcctacaagaaaagttagaatctgaagaaaatgtatggcagttagaatccacaaaatcaattttgaagcagtttggtacttgtcttatatatactgagaccacagacacaatcaagcaaaaaaagaaaaagggtcatggagaaaaagatgaaaaccgacaggaaagaagggagagaaaagacaactctaattttacattgaactctcaggtcaaatcagttgaatctgaaacaacctattctgaaacatctgaaatagaataaaggaatacagatggttcaaaatgcatttgtcctcctgttaatgagggatcagagtaccatattaagtcctgcattaattgtttttaaaatagtaaatacttttaaaagtaaatttcataacaattcatgtcggtcacatttatgtacctatggtcaactgctctagacaaggggagcaagttgagtagcagggtaaaagaaaaatatcctgattattaatggaattaatgatctcttcttcatttacgactcaaacataggcaatatactctgtttcccgaaatactgagcaaccagttacgaactgtcatttactgtgcatctgctatgtaactgtgtgccagagaccattacatcaaagtaaaagagatgattcctgatcttcaggagttgagagtttgagacataagccatttaatgaaaccacagtgaatggtacaaaatacaacattccatttacccaaaaggaagacaaaagttgttcccaagtagtttaactttaaaatagggtggttcttaaattcatgtggaggtgccatctagtggtgaaagaggtaactgtgaaggaagccaagccgtcagggagatagaggccaggcctttctaattatcatataatcccactgcgattttgtcagttgtaggagtcttcctgtatcttagaaataaattataaaaccaaattatgtggataggagcagtatcaccaggggaagaggtttcaaaattacagtaaaaatttcaaatcaacaaagagggtcatacaatttttacaggtaaagaactttagggcaaccctgttttgtcattgcatttagggaacataggacatattaatatcaggagttacagttgaataaagatgcctacattccaagttctgtggataaatttatggtgaattgtttttctacaaagaagttgagaataagtaaaaatggtgaaagtgagggaaacgttgaggatcctaaagataatgtcagtaaggagaactataaagagccataagtggtaaaacacacacacaaccttcctatgtatactcttacccctacaggtaccctgtaacactccacagacaggatagaaatggatttcccgttaattacagagctggttgtatagatttcatataaccatgtagtatttgaggaaaacacaaggcttaagtactgtttaaagcaaacaaaatctagatgaaaatatattaaaaccaaccgaaggcactgaaatctgagttagtgaacagcgtacatattagtaaggaaacgcagtgtcaaagcttataagcacatatagaaaccaaaatgagataaatcacggggtgctgaggagaggcgatgggcagagtgtggaaggaaagcaagccgacttgaagtatttattagcagatacattctttggaaaacaaataggtggttacaaagtacttaaaactttcatcctcttaaacagtttaaatactctctcaccatcttgcttacatgattaatttacctagcaaatcctttactcgtgtagggaacaggggtaaaaactgcagccagatcttgcgtgactccaggcggtggcatctgaagtcaggcaccgtggcgctgcaccgcacgtggacgggtgctggcgattacatgcggggaagaagagcgagccttctcaggcctgtgggtggatttctttctgccacttgaggtggcagcactcacgctgtagccaagagaataatttttttgcgagcactctgctgtaggtggtgtattttgaatagagcttctaaacagttttgagagtaaagagcaatgaatcattcattttacattttgaaggcacatctcactctgaagtccagtgctcagagagctgacccacgtatttacttggggtaacaccaacttcagaatttaacaaccccctttaaagctgtattttctatttcctttcatccttcctctgcctccttgtggctgactatctatctgcatctctctcctcactgcatccttggtctgctgttttttgactttattattaaaaagtatcctctgttcttatgtttgaaatctggtgaattaagtccttgtacatttctctcttctcttagaacagccctactgagttgactttgaaatttacgggtgacctcaaactgattttctttttcccagtgagtcaggggtccttaattagaaagaaagaaaaaaaaatagttccctggcccctgatggagagagcagatgaacttgtgttatcacagcccagctcggaaggcttgtctggagcctgggggaaatgagcggggaaggcccttgtgtgccgtaggagcgaccttataaacaagctcggttcattaacctccccactggcgtctacgtgcctgcacgtgggggcgaatgaccatgagctttaagttggggtttcctggctttgtgaagtttgacaactcaaatgttcttcaattgtgtttgggatgtggtgtatttcccagtttttatagtagtctgtttaaaggaatgaagaaagacattaaatatttattttagttgacaagataaatgaaagctgctactgggaagatatctggcagttctgaaatctaggtttgtttttccacttccaaaacatgcccattgtatgcctttgaatggatgatacattaattagataaacattttattatgaggcagattataataaacatctactttgaacattttaatttaaagattctaatctcgaaaggaaatttaattccttcagagagtagaaagacatctttcctagaatgccagtaggctcattttggagggtctctagaaaattctagacctgcccaggaacagaagcagtttatctggcaagtcagtgagcctgcagatggccagaccattgttagcagggcttactcatgcagttctagttcccaggctaagcttgaaagtcatccgacccagcagcgaagccatttgatcgtaggaccagcactgttctgtctccttgttccccccagtctccacctttgccaaggtgtacttgggcgccagccccagggtcaggttgccagataatgtatccattgctaatgagttcagagacctctctgctcagggccaagcgacgggacagatccttctgctctgagactggctggctggcacaaatgagctgctaggatctcactggagaaatctccactgggctgaatcagctgagacctaagcctctcagccctgttgagctgctccttgtttgacaaaggctttaacccccaaattctcacccaagcagagaacttgcctcttctctgcccacttcaaaaccagatgacttacagaatgaagaaaggatggatagactatcatgacaggttctgtgtgtgtgtgtgtgcgcgtgcatgtgtgcgcacacacattgagacagttaatcatattattctagaaaaaaaaagtagatccttagtgcccaggttccttagcagtgctgggataaacaggtgtctgtttgtaccgtaggttcaaagagaaaatcaatctactggtcagctgttgaggtttttactaagcacccgttatagaggaagcaaaaggagaaagtggtccctgagttcaggggttgacagcctaggatgtgaggagacaaatgcataattttctgtaatattgtgcatactccttaggacttcacgagagacgttgtgctggaggaactggagagggctctgtggagaagatgaggctttagctggtcctggaggtgtcagggcttggagaagaggggagaagagaaggcataaagcttctgcagcaagaatgagttttccaggcatggggaactgaggggagaggggtcttccatgacagagggtacataacattttacagatgagttgaaaatcaaattgctcaaaagatggagagtaggttctggggggacttggaagttacgcagcatttactgttggtgtggttggcaaaagtgaaagctgtagatacttaaataagagtatggcaggttgcaagtagtattttagggcaatttggtctgacagatgtatgcaagttgacctgtttggggggtgggtttagagcagagacaggaaatgaggagccactgcttctgctttctgcttctgctttcctctccgtgttattgatcccctacaaggataaattataggactgtatccaggagtcatgccttctgaagtagagttgtaataatgagactgtggcatcacttctaacttgtgataggccaagtaaacaagacagtgaagccattatttaaagtctgtgagagaaccaagattttgagagataatatggaggtattatatagcctaggataggacatgatattgggtaaagcggccaacctggtggttcttaggcagggctttgtttattttagtgattacagcacaaaacaaagggtcctaagaatgttaagtgattcttcatggttctccacatttgccctttcctctgcccacttcccatcaaaaccagataccttacagaatgaagaaagggacactgaaatgacagccagtggtgtcatctgagctgcctattagagtataataaggcacatttctatgactatgatttaatatttcttcctctcagcacctccttgcctccctcgtttccttgaaatgtgaggcacaagtagaaagtgtccgagggcacctgaggtcacaggcaggacctgcagaaaagtgaaggtttaagcacagacgggttctgcctgcctggactccctctcacgtgctggttgacacagagacaaaggtggctctacctggggccacataattttcatgtttcatttatactgccttctactagaatgagcttgatgtagcaactggaggccccagttttcattcttgctctgtccctggacacctgtgtaggcatcgagcaaattgtctgcccgtcctggatgtctactccctcatctgcaaaaacttggggtgagccccttccagtggttcttggagaacagacatatgtgtgtaccggggtggtggggagagggagtcctcagaactggtgcttttctctcctcccaaacatggcttcaggaagggcaggaacaacaggggtttggttaaacctgcaactgtagattgagcacagtgttcttttgcttggatacatggtacaacaagaaagtctggattgtgttcatctgcatgtgtgtgtttgatttgccttctggggttagctcctgcccacatgctgtgctaagttaatatggtctttcttccttacatgctgcctttttaaaaactcagaatcacagaactgattggttaccaccctgaggagctgcttggccgctcagcctatgaattctaccatgcgctagactccgagaacatgaccaagagtcaccagaactgtgagttccaggagtgccccttgtggcttccttgtgtctgtggtatgtggccttgagtggggtgtgactggtgagacagaagaccaggtcacttcctccacagagctgctgtcttgtgtggcagacaagacttatgccctcaagatggttagaaaaccaaggctgccaccagcctatagactccttcgtgcaaattagaaaaaggacacttcctccagggagacgcacccgtgccaaggtgcacagctgaggcagtggagggtgggttgagtctcagtcccccataccacctccacggagtgcctgtgtgcagtcagtggtttgcacaccttgtggaacagcactgtagagagtaaaataattcaacatatcatcaacttgggtgcatgctatagattcaagtacatacattcacagaagaggagggcagggggagttgaggaaaggacacttgagttggaccttgaaggatcggggaggcttaggctgaacagaggggaaagtattacgggtccaacttaacacatatgttgaggtaggccacagttctcagagagcttgcttgctggatcaagggagctttagaaaaggctgtccaggcaacccagggatggcgtatggaaactctgctttgcagtttgaaagaagcctgagttatgtaaggactctggaagagggctgccacatagaactttctgcagtggaaatgttcttgaaatgtggctagagaaaccgaggaactgaactttatacaatgtagttttaattaatttaaatgtaaatatccacacttggctcgtagctaccatattggacagagaagttctagagtgtatccttggccatgttcccaattcaggcttcctataggcaggtgatccaggaccgttcccttgaatccatgcgactcatcactgtgcaagggctctgggcctataaccctgtacttggcccactgggggtgatataaattggtagaattgattcctgccctaagtgaccttatttctgaggaaaaaagaggaccgtgggctccttgggaacaaggggctcatatctttaacctcagtatctagcatagcgtctggtacagaacaggcactaaatgcactatataaaccgatgggcaagactgtatttggaaaagaatgcttcaaaacgagtgcccacagtggtgcagacagtggtgctgagaggattatgggaggattaaaaacgggtaaagtaagtctgagaagattcccagtggccctgctggcaatggagaaaacggaagggcagccatttgtccatggctcctaaatccacccatctaccccaaggctaagacagccaagttcagtgcagccagcagagtcacaaccccgcaagctgtatgtgaacatggttaacccactcttaaggagtgagatctttcttttcttttattggttcctctgcctcttcctcatggcttttgggtttgatttgacagtacaacagggcccattatgatatctcagagaagtttctcactgtgctctctggcaaaacacacacgcgcacacacagacacacacacacaaacaacctagattcagccccactcaggaacccagagatggggtaggagtggaggtactcttttatgcctgtgaatgtgaccccaccttagcctgcccaagctttgaaattgtaacatctggttccagccttccctttgggattccttcatgcttcctggtccctgaggggttcctgttttcaaaggcaggtgacagaatcatccaggcactgggacttagcggcccaggctctggcccagccgacccactgattccctagggcctggatttctggaccttcctgactttagatgtaaaactggggaaaagtctagccttccttccaagctaagggtgaagccaaggcaagagacaaatgtaaaaatttctgggaattcttggaggacagtattaccttttatcttgtaggatgggaaagcagaagaagctactgtcaaaggaaaaaaaaattgtgacttctgactaggcatatagaaaggattttccctcttgttcttcttagaacatcttcaatccataaaaagggctaggataaaaatggtttatgttttctgctgactctagggaaaataaggtgctttttactgaatccgtgtatttacttattaggcacactgaaaggtaactcacagcccatatagaaatcacaggctctctctccccttgatggagccaagtaaagctgccctgagctcagaaacccatagctagcaaagggacaaacccatagctagcaaagggaaatctgcttgggttggaaattggattaatgacagttatgacacgagcttgccccttgcccccgacccctgtctctcattcgtccttgaggttttgcaagtcaagtttcactacagactgacacacatgctctagactaactggaggctcaggtttgagacaggtccagattcacacactgggatcccccatttacacacatgtatgtcttagcctgtaaaggtttaccgttgaaatgcctggagaagctcaactagatttagatcattgaaagctgtaatttccaaatggattaataatttatacactgttactctgggcgtgaggttaggggtcagtctccctttgttatatgaggatattatgtgcttttaggctttttatggcctttaatcttattttcctatctattaagtagcaggcccttcaccaaggctggcattaatgaccagatgattagaaagctggcgttaattatattctactgacagagcaggcccttgcctgcaattgttagaaatgcacttaaaacctttgcttgctgcactgtttgatcaaaaagagtaagagccctgaatttggtttgcattaaggaccatctaaataagttaaatacaggcacttgaaattgtgcaagaatcattttactgcagcagaggagcctcagtggcacagataaagggagagcagagaggacaaaagttatttccttggttgagtccatgatggtttaggacagcggcaacagcaagtttggtcttcccagtgatttgtggacccaggtaataaagagaccattgtattaggagccaccagacatgttgtgtagctcagactctgtcactattgtcttgtaagctgtgaagcaaatcataaccctctggccttagtttcctcatgttaaaagaaaatacttatcctccctgtggcacagggttttgtttaaaagattagacaagatgatacaaccattttggaaataatttggcagcttcttataaacatatactttacaggtaagccagcaattgcactcctagctgcacccacgagaaatgaaaatatgtccatacaaagatttatacacaaatgtttatagcagctttattcataataatcaaaaactgaaaacaactcaaacatccatcaacaggcagatggataaacaaattatggtatgtccatgcaacggaatacaactcactgatgaaaaggaataaaccacaaatgcctgcaacgccatgatgaatctcaaaacatgctgagtgtagagaagccagacacaagagtagatactcctatacaattccacttacatggaaatctagaaaagacaattcgaatatatagtggcaaaaagcagaagagtggttgcctggaaccagggtgggaatgaagattaactgcccagaggcataaaaaatggggtggtgggggcggtgatggaaaagtgctatgccttcactgtacctttgtcaaaacttgttgaactgtatacttcaaatgggtgtgtgttttattgaaggtaaatttgaccccaataacatttatttttaaaaattaagagcaaacagaaaaagcttagactaggaatctttaatttgaactataattctgtctactgtttccactgaggtggtctttcagcaaatgactcagtagttttaagcctcagtttcttcagctgtaaagtgggaataacaacaggcaccccatggtgttgcctatgaaatgcagtgatgatgacctaatccttagtgagcgccctatgtgccaggcactgtgctgaatgctttgcagaaacgaattcatcttatcagatagttctgaacactgcaaagcactatacaaatgtaagttacaggaattcttgcactttgcaggtgcttgttaaattgtgaagaagaaagcaaaacataagtgtaaaggattaccaaactgcactagtatgaagagagccatgttcctcagctgtacagggctgatgaatggggaggaggcctgcgagcctaccaggagaaccggggagactctcggtctaccgagagcctggatatcctcccgagtggcccctcatgagactatctaccaacgtgtaacagactgtctgtgacaggtcatgggcataatatgtattagtatctctaagaaagaggtggcttttcctatacaaaatttgttggtgacagttggtcaacacttatgtacctgataagccatgtgggtacagtcgatcctcagtacaaatggcagtggtatgctgggtagctaatgatgacagttattaccgttactactattattatcaatatcctgttttgcagaggaggaaaccaaaaccaagaaggattgttcctttccccaaatcccaagctagcaagatttcccgatcctccctccatgccctttcctaacgtctctgtgatttgggagcttctgagctggagttctgtaaattcccaaggaatgggcagttcagaaaaataccaaaaattctaacattattagactttaaagagatttattgattccttttgaatggcagcagatggaacattctggactggggaaggacagtctgtgatgtgaaacccttccccaaggtagacaacaaaagcgttttttaaatgaacacttagtagaacaatctagaagaggaaaaacctcataagtaggaagcctagctgggcggttgggagaaggagtataagtgatttattacagcttatgaagagactgtgtgtgggctgccagggtcccagctctttctcagccccaactgagaaagggtggggtggtttgcctctgcctttgctgtgggtcacaaaccttcagtggcccaaaaggtggcaagcctgacagatgacctggagaaatcaaggatatcaatgttttaaatgcttttattcataagcagggtattggtggtgggtctgctgaaaaaaaaaaacaaaaaaaaacaaaaaaaactgccctgaggtcaggctttctccaggctgcttagaagtccccccacctggagtgcttgacgggatggcgctccttacccagtgtgaaggggcttcttctcattgaaccccatgaagaaagtaaggcaggttctggacttggttctgcttatagctgagctggtctgtgagcctgacttgtccagggattggtgatgggccactgcaaagctgcatagtgagcgggtccctccctcagtagacagccttgggcaagtcatttcacctcttctcacctctttttcctatatttaaaatgaagagttggctgaggtgatccctaagctccctcccaggtcactctccctggtcctcactgtcgtggcgccctgttctgtctgttcccctgcagattagactgccctcccatgcgatctgctgagcctgtggtgcacacccctgccccacctccctaagctcagctctgtttctcctcccctagtgtgcaccaagggtcaggtagtaagtggccagtaccggatgctcgcaaagcatgggggctacgtgtggctggagacccaggggacggtcatctacaaccctcgcaacctgcagccccagtgcatcatgtgtgtcaactacgtcctgaggtaagcatgtgagggctggcgggccttggtgcagggtatgtgggggtgcccaagcttcccagactcaggatgacaggcctaggagatgccaggcctctcagcgccctgggcaccacctcagggaggtcttgcagggctaaccctagtgactgagaggacttcctgtggatgtcttggaacagtgggatgctgggttgggatttttttttctgcgctttccctggcatctgtcatttatgccatgcatctgacccaggtggggaggcagatagcacacaatagttaatattttctgaatggggaaaaaggaaagagaatcgcttatgcttttgggaaaaaaaaagatgtcatgccttcactctatagtacctggaaagaaagctagaggaagtcatttctagttgtttctacagacagagaaaaacaaaagcatcaggcctcatatataccaccccactcaggtgcaataatatttaataaaacaggatccgaaacagacatacattcagaggatacctctgttgtcactacctccatggctcacacacttctattgtatggttctttataagacgccaatgcctggagtcctacccattttttgtcggagagcttagctatgagggtttccatgcatctaggggagcagaatttttctagaaaatgtggaaagtctgaatggctctttcccccccattagtgagattgagaagaatgacgtggtgttctccatggaccagactgaatccctgttcaagccccacctgatggccatgaacagcatctttgatagcagtggcaagggggctgtgtctgagaagagtaacttcctattcaccaagctaaaggaggagcccgaggagctggcccagctggctcccaccccaggagacgccatcatctctctggatttcggtgggtgcttcttagctaagccaggcccctggaaccccgttggggctgggaagagttcttactataacaggcctccctggctgcagctttttcttaaccagagctaccccagccccccaagtcttgttaatcacctgttagaggccaggccctgctgagcacaaaagaacaccacacgctcctgccctgataagaccatcccatatccgacctcaccaagtgctgtacgaggaggggttaagagaggacacccccctgagggtcgattctccaccatgggtggtgagagtctgagatgagagggaggggagaggtgagggatctgctccgaggccacttggacactgtcaaagagaaggggcagattcctaccagggtctggaaggacagatggcttgttcaggcagagggccaagttggagtaatgttgggaaggatcattccaaaaacacagagaacatattgaggcctgggattaagccctcaaacccacgacttcattaaagtgtctgcctgtccctggggatgtaagtcactggggaccccggcagggttttcagccctcggctgctccaatcctggaaacacccttgaagccccatgctccccagttcgcaacccgctgccaccctctcctggccttgctgtggctgccggaagagtggtgctcaccctggactgtgtcagccccttttagatgggttctacagcggccacgtgaggattgcagctaaagagaatctgaaacgcagcgggcccttggccagtaggtctcgcggcttgttttgtggcagtactgaggcaaatagctcaatagcccaattctcctctccctctcataccttccttgtctacccttccggatctgttcctcagggaagagtggctcctaatatatttagtctctgaaaattaaatgtcccaggagactgttccgtttaaagggagtctctacgttgactcatagccagagtcaaagacccatgtgttccagctgagccccagggtgttgggggggcctagccccaggcatgccttccagaccctcttagggccttctctgcggtttttgggcctcctctgccttggggtgagcccgatggttgtgggtgttcacctcccaggcccttgtctccacagggaatcagaacttcgaggagtcctcagcctatggcaaggccatcctgcccccgagccagccatgggccacggagttgaggagccacagcacccagagcgaggctgggagcctgcctgccttcaccgtgccccaggcagctgccccgggcagcaccacccccagtgccaccagcagcagcagcagctgctccacggtgagcagccctcttatggcgaggacacagagagggctccgtatgtatgactgctgccagatggctgaagggacatttgggacaggtactgtccttctcaggttatcacagagccccctagagtggccgtgacacttacctaccaggtatcagagctgttttcttccttttagtgttcatcccccaactccattgaaataagctccttgaagggctttgagcccccagctcagtccccatacagggcagtaacatcccgtatgtggcacagagctgcacagtttgcacagccctgctggccacagcctgtatcctgtttggtcctcaagacaggacaacctgtgaagcgacagtagcctcattttatgatgaggagactggaatttagagaggttgatgaattgacctaattcatacagcttgttaattagcggcccctctacaaatagttgtgtggtggaatggaattgaacctttgggtccaggaaggtatttcttcttccatgctggacttctggggagaccagtgccatatctttgactctgtccccctccttcctggcccctagcccaatagccctgaagactattacacatctttggataacgacctgaagattgaagtgattgagaagctcttcgccatggacacagaggccaaggaccaatgcagtacccaggtagatggctgtggagatcaggctagggtgtgtgcctgctgtctggtggacagcaaaggctcacatccattcttgtagcctcatccctttgttgtaaagagcagtggagacgtttggccaaggcccaggtcccctaaagaggtaggggtacagggtaatggagcctgtggtcaccccctcctcccactgtcaaatccagctcttccagcatatgtgtctcctacttagatagctttcttagcacacatgaaaaccgaaatgataccactgcacctttctttaaacaggccctacatttaacaagcatagccagatgtataaaacatgtataaacataggggacaattaatccctttataaacacattcatcttgtgattttaaaaaaataatcatttttatatgaaatgcactttaaaataaataacatctgtttgacaatttttcatttacataaaacttttcaggaacacatttattacataaggccaatgttcttgcaaaaactatgtaaacaaggataaggtagagggaggggtacgtgttttacaaaaccccagggaaaaccattaatcccccatttgtcttagtcttgagttcaaccagatttctgccttgccacttagtttgtttcttgatcctacttggcacaaatcccagctactctgcaaaacatgcccaattttagcttttctatcaccctccctcctcagcactcctgtagtatatatcatgtggcacttaatcacagctatctgcttctgctccttaaagattgcttagtattgcagtcattagtcagctgacacccactgagggtgtcagtctctgaagttagaaactgttttccgcatctgcttgtattcccctgcttgtatcatgcgtccgtcatgatactgccaccctaagggatgatctgagtatctgctgattggaaccaaagtctctgtccctggggtctggctgttaggctgttactctgcgagagtccacagatggacctgggcacttactgcttgcttaggcccgtgccagcttacaggagggagaagaggacaaaaaaaagccacagtgtgcaccacaggcctaagcattgtaggacaaggataaccaccacaggctggagtaggcagggctgactctgtggaagaggggctgcctcggcttcaagagagaaggcgggctccggacaggtgggatggggagaggagaacatttctcaatgtgcagggtgaagaggggataaacatgggggaaggctggtacatgatacaaggtcgtgtacatgacacagccaagtctgaggttttcctgataggccctcgggagccagtggaggcgtttgagcagcactgtgaaacagtgcttgagatgaatggctctgcaggagctgagttggaatagtgtttgtgaggtcgtaccaacccccttgcctctttgccggtgctgtctcccctcagacggatttcaatgagctggacttggagacactggcaccctatatccccatggacggggaagacttccagctaagccccatctgccccgaggagcggctcttggcggagaacccacagtccaccccccagcactgcttcagtgccatgacaaacatcttccagccactggcccctgtagccccgcacagtcccttcctcctggacaagtttcagcagcagctggagagcaagaagacagagcccgagcaccggcccatgtcctccatcttctttgatgccggaagcaaagcatccctgccaccgtgctgtggccaggccagcacccctctctcttccatggggggcagatccaatacccagtggcccccagatccaccattacattttgggcccacaaagtgggccgtcggggatcagcgcacagagttcttgggagcagcgccgttggggccccctgtctctccaccccatgtctccaccttcaagacaaggtaagtggcagatactcagctgtaccagcagggccgaaccgagaggcacccactagtaagatagctggacccccagggaggcccctgcccctctccccagccatctgataccccatttagcccttctctgagctcagactttggggaatcacctcaagccatgtgaggcctagtgtaggatgggtttttatctgggctgccactgagggcaggcaaagaagtggcttgttgagagccctgtacctcagtgtctcccttcggaccaccaccagagtgcctttcgtatctcggttcatcatctgagccacacagaaaattgagtgatgattttccctggttgaaaacagcaaaaagatacccctgcctccccttgccttttggctgcccccgggtcctcgccactgcagcctctcccagctgtgcctaggctccagaaatgccttcccatctccccagcatgctcatttcaccagctgcgagctcactgggctaaggcacaggggttggtacatgacctgccactcccaggggccgctggtacttgccctttatagagcagccaaactagttttcagtgggagcaaaaggcagaggagagacatgggcagaagaaaccctcctaaggactaacattgcccagccaggcagccatcccccagaccaggaggcttgagcccttcagcatgttatagctgaggaaggagacagagctcgagctcggcctgcaggtgcacagcctgcctctgagactctgccttttgggtctttgagtcatcacaggcatcagcattgggactggaagggcccctaagatgagaaggcactgagtggcatgtggctccagactccctcatagcctgctctctcgggcttggcaggtctgcaaagggttttggggctcgaggcccagacgtgctgagtccggccatggtagccctctccaacaagctgaagctgaagcgacagctggagtatgaagagcaagccttccaggacctgagcggggtgagtcatccccactggccacaggggcctctccatagcccttagggaacccagggctgctgagaggggtggggatgtggcccttccaagccagcatagcccttagggaacccagggctgctgagaggggtggggatgtggcccttccaagccagcaagtgccagccctgttccaggcccacccaacccacccagtctggggacctggttctctggccatttcccctttccatctgcccttcttactcccagggggacccacctggtggcagcacctcacatttgatgtggaaacggatgaagaacctcaggggtgggagctgccctttgatgccggacaagccactgagcgcaaatgtacccaatggtgagcagcggccacaggcctgggcctcctgggggttctggtggaaggactggggctcgggagcccatcctggttcttccattcaccacaggccgtacctgcctctctgagccttgttagaatggggcgatgtcctctgtctctcccgcagtcccacacacccaacttttccatctccactctgacttagatgatgccatcagagggtcctgaaggttggctgtagttctggtgactctgagcaccttttataaaggaaagggatgctagggcttcctggcctctcccctccctcaggccaatgctaccgtcactctctgactttggtctttcagataagttcacccaaaaccccatgaggggcctgggccatcccctgagacatctgccgctgccacagcctccatctgccatcagtcccggggagaacagcaagagcaggttccccccacagtgctacgccacccagtaccaggactacagcctgtcgtcagcccacaaggtgtcaggtgggtgtgcccaggatctgtcacccccatcccaggattcgatgccaggggaagcccacgtctactttttttccagcgtctgcacagtgccaggcacagggaggtgcttgacttgaagtcacctatacagggctcaggtctccttggatttagggaacctcctcacaagttccttgtgacatcagtgatcaggccccccagtgggtgggtctgagacacggctaaaaaactcaaactcaggctagaatactgaaggaaagaatgcagaccactaccgactgcccaaagaggactgaacactgaacactgggttggcgacccccagaacactgtaccactgttgacaggagcactttcagaagaaagagcaggcggccacagtggtgagggcctgttgaagaagagaagagaaagttcagagagagagagttgggaaggggtctgggcagaggcaggggatctcccgtctatgcacggatgagcttgctgcgtggagaagggagtgctccttccctggggctttagggagaaccctcccatgatcaggtgccatccagggctctttccaccctgagaatcccggagccttgccccttcctcagttcttcatgtggatgtgttttggggtgtcactctgagttcaggcaggtgctgagaacatgccaaaacttccttcaggtagaacagcctggaaagctctggtaggcccaccccactggacttggttcaactgcaggcaccaatgcctgccttcaaccctgggccaccttcatcttgacagtatcttgtgaaacatatatgtcttcatgaggtttgtttggcctgaaaataattcgtggtttatggaaaaacataccaggcccctgttctaaaaggcaatttcctcagcaatagagtttggggaaggttatagttctgtgcttcagagtccaggctgtagaaccaccagacagccctggcttaaattctggctctgctgttgagttcaggggctggtatatatttatgtgcagtaagaggtagccagcactattcttcctgttatgtgaagcccacgaattaccttgaatattgaaatcaagggaaaatcatattcttttcaaaagagttgaatcatatcaaactcttttctgaccatgaataagagaagttagcaagggatggtgagcaggtatccattgatactgtccacaggagcagtcaagctggggaggcaggcatggaccccagcaaggatctgagctaggaggtgcaggaggcaatggccactggaacgaggctctgcagataagggaaggtgggtgggcatctcccatcggaggggcagaatgcagggcttccaggctctctgctgccacctaagcctttcctccttgggatgggggcctgtgtgtgtgctgcgagtgtcccccctgccactccctggtctgcctcctcggcaagagaatagcacagaggcaagaagaaaggactgctgagggtggtgaccagaaactggattttcagactgttgaatcttgaggcagtctgtgtttgcatctgtatgtatgtgtgtgttctgcatgttctgtgtatgtgagcataggtgccaggtggttcagcctttcctccctgctgccaggaggcatgggggtcagcaaccccaggctcttcctgaagcttccacatacctgtgctgcagcccgcacctcacgctttcctctttcttgggtctcagcaccccacctgaggcagtggttctggaggcagacacgttccccgggcatgcagcaggccgtgggacagacaccactgaaggagcagagtgaaattagggctgctctattggtatcccccagtcacaaagaagtagacacttttccaaatgttcgatttaggcctttaagttatggtaccaacccttctttcaggcatggcaagccggctgctcgggccctcatttgagtcctacctgctgcccgaactgaccagatatgactgtgaggtgaacgtgcccgtgctgggaagctccacgctcctgcaaggaggggacctcctcagagccctggaccaggccacctgagccaggccttctacctgggcagcacctctgccgacgccgtcccaccagcttcactctctccgtctgtttttgcaactaggtatttctaacgccagcacactatttacaagatggacttacctggcagacttgcccaggtcaccaagcagtggcctttttctgagatgctcactttattatccctatttttaaagtacacaattgttttacctgttctgaaatgttcttaaattttgtaggatttttttcctccccaccttcaatgacttctaatttatattatccataggtttctctccctccttctccttctcacacacaactgtccatactaacaagtttggtgcatgtctgttcttctgtagggagaagctttagcttcattttactaaaaagattcctcgttattgttgttgccaaagagaaacaaaaatgattttgctttccaagcttggtttgtggcgtctccctcgcagagcccttctcgtttcttttttaaactaatcaccatattgtaaatttcagggtttttttttttgtttaagctgactctttgctctaattttggaaaaaaagaaatgtgaagggtcaactccaacgtatgtggttatctgtgaaagttgcacagcgtggcttttcctaaactggtgtttttcccccgcatttggtggattttttattattattcaaaaacataactgagttttttaaaagaggagaaaatttatatctgggttaagtgtttatcatatatatgggtactttgtaatatctaaaaacttagaaacggaaatggaatcctgctcacaaaatcactttaagatcttttcgaagctgttaatttttcttagtgttgtggacactgcagacttgtccagtgctcccacggcctgtacggacactgtggaaggcctccctctgtcggctttttgccatctgtgatatgccataggtgtgacaatccgagcagtggagtcattcagcgggagcactgcgcgctatcccctcacattctctatgtactatgtatgtatgtattattattattgctgccaagagggtctgatggcacgttgtggggtcggggggtggggcggggaagtgctctaacttttcttaaggttttgttgctagcccttcaagtgcactgagctatgtgactcggatggtctttcacacggcacatttggacatttccagaactaccatgagatggtttagacgggaattcatgcaaatgaggggtcaaaaatggtatagtgaccccgtccacgtcctccaagctcacgaccttggagccccgtggagctggactgaggaggaggctgcacagcgggagagcagctggtccagaccagccctgcagcccccactcagccggcagccagatggccccgcaaggcctccagggatggcccctagccacaggccctggctgaggtctctgggtcggtcagtgacatgtaggtaggaagcactgaaaatagtgttcccagagcactttgcaactccctgggtaagagggacgacacctctggtttttcaataccaattacatggaacttttctgtaatgggtacaatgaagaagtttctaaaaacacacacaaagcacattgggccaactatttagtaagcccggatagacttattgccaaaaacaaaaaatagctttcaaaagaaatttaagttctatgagaaattccttagtcatggtgttgcgtaaatcatattttagctgcacggcattaccccacacagggtggcagaacttgaagggttactgacgtgtaaatgctggtatttgatttcctgtgtgtgttgccctggcattaagggcattttacccttgcagttttactaaaacactgaaaaatattccaagcttcatattaaccctacctgtcaacgtaacgatttcatgaacgttattatattgtcgaattcctactgacaacattataactgtatgggagcttaactttataaggaaatgtattttgacactggtatcttattaaagtattctgatcctaccactg

SEQ ID NO: 274 - DNA, 5148 bp, Homo sapiens
cggaccgccacacgggtccggtgcccgctgcgcttccgccccagcgctcctgaggcggccgtacaatcctcggcagtgtcctgagactgtatggtcagctcagcccggcctccgactccttccgactcccagcattcgagccacttttttttttctttgaaaactcagaaaagtgactccttttccagggaaaaaggaacttgggttcccttctctccgtcctcttttcgggtctgacagcctccacccactccttccccggaccccgcctccgcgcgcaggttcctcccagtcacctttctccacccccgcccccgcacctagcccgccgcgcgccaccttccacctgactgcgcggggcgctcgggacctgcgcgcacctcggaccttcaccacccgcccgggccgcggggagcggacgagggccacagccccccacccgccagggagcccaggtgctcggcgtctgaacgtctcaaagggccacagcgacaatgacagctgacaaggagaagaaaaggagtagctcggagaggaggaaggagaagtcccgggatgctgcgcggtgccggcggagcaaggagacggaggtgttctatgagctggcccatgagctgcctctgccccacagtgtgagctcccatctggacaaggcctccatcatgcgactggcaatcagcttcctgcgaacacacaagctcctctcctcagtttgctctgaaaacgagtccgaagccgaagctgaccagcagatggacaacttgtacctgaaagccttggagggtttcattgccgtggtgacccaagatggcgacatgatctttctgtcagaaaacatcagcaagttcatgggacttacacaggtggagctaacaggacatagtatctttgacttcactcatccctgcgaccatgaggagattcgtgagaacctgagtctcaaaaatggctctggttttgggaaaaaaagcaaagacatgtccacagagcgggacttcttcatgaggatgaagtgcacggtcaccaacagaggccgtactgtcaacctcaagtcagccacctggaaggtcttgcactgcacgggccaggtgaaagtctacaacaactgccctcctcacaatagtctgtgtggctacaaggagcccctgctgtcctgcctcatcatcatgtgtgaaccaatccagcacccatcccacatggacatccccctggatagcaagaccttcctgagccgccacagcatggacatgaagttcacctactgtgatgacagaatcacagaactgattggttaccaccctgaggagctgcttggccgctcagcctatgaattctaccatgcgctagactccgagaacatgaccaagagtcaccagaacttgtgcaccaagggtcaggtagtaagtggccagtaccggatgctcgcaaagcatgggggctacgtgtggctggagacccaggggacggtcatctacaaccctcgcaacctgcagccccagtgcatcatgtgtgtcaactacgtcctgagtgagattgagaagaatgacgtggtgttctccatggaccagactgaatccctgttcaagccccacctgatggccatgaacagcatctttgatagcagtggcaagggggctgtgtctgagaagagtaacttcctattcaccaagctaaaggaggagcccgaggagctggcccagctggctcccaccccaggagacgccatcatctctctggatttcgggaatcagaacttcgaggagtcctcagcctatggcaaggccatcctgcccccgagccagccatgggccacggagttgaggagccacagcacccagagcgaggctgggagcctgcctgccttcaccgtgccccaggcagctgccccgggcagcaccacccccagtgccaccagcagcagcagcagctgctccacgcccaatagccctgaagactattacacatctttggataacgacctgaagattgaagtgattgagaagctcttcgccatggacacagaggccaaggaccaatgcagtacccagacggatttcaatgagctggacttggagacactggcaccctatatccccatggacggggaagacttccagctaagccccatctgccccgaggagcggctcttggcggagaacccacagtccaccccccagcactgcttcagtgccatgacaaacatcttccagccactggcccctgtagccccgcacagtcccttcctcctggacaagtttcagcagcagctggagagcaagaagacagagcccgagcaccggcccatgtcctccatcttctttgatgccggaagcaaagcatccctgccaccgtgctgtggccaggccagcacccctctctcttccatggggggcagatccaatacccagtggcccccagatccaccattacattttgggcccacaaagtgggccgtcggggatcagcgcacagagttcttgggagcagcgccgttggggccccctgtctctccaccccatgtctccaccttcaagacaaggtctgcaaagggttttggggctcgaggcccagacgtgctgagtccggccatggtagccctctccaacaagctgaagctgaagcgacagctggagtatgaagagcaagccttccaggacctgagcgggggggacccacctggtggcagcacctcacatttgatgtggaaacggatgaagaacctcaggggtgggagctgccctttgatgccggacaagccactgagcgcaaatgtacccaatgataagttcacccaaaaccccatgaggggcctgggccatcccctgagacatctgccgctgccacagcctccatctgccatcagtcccggggagaacagcaagagcaggttccccccacagtgctacgccacccagtaccaggactacagcctgtcgtcagcccacaaggtgtcaggcatggcaagccggctgctcgggccctcatttgagtcctacctgctgcccgaactgaccagatatgactgtgaggtgaacgtgcccgtgctgggaagctccacgctcctgcaaggaggggacctcctcagagccctggaccaggccacctgagccaggccttctacctgggcagcacctctgccgacgccgtcccaccagcttcactctctccgtctgtttttgcaactaggtatttctaacgccagcacactatttacaagatggacttacctggcagacttgcccaggtcaccaagcagtggcctttttctgagatgctcactttattatccctatttttaaagtacacaattgttttacctgttctgaaatgttcttaaattttgtaggatttttttcctccccaccttcaatgacttctaatttatattatccataggtttctctccctccttctccttctcacacacaactgtccatactaacaagtttggtgcatgtctgttcttctgtagggagaagctttagcttcattttactaaaaagattcctcgttattgttgttgccaaagagaaacaaaaatgattttgctttccaagcttggtttgtggcgtctccctcgcagagcccttctcgtttcttttttaaactaatcaccatattgtaaatttcagggtttttttttttgtttaagctgactctttgctctaattttggaaaaaaagaaatgtgaagggtcaactccaacgtatgtggttatctgtgaaagttgcacagcgtggcttttcctaaactggtgtttttcccccgcatttggtggattttttattattattcaaaaacataactgagttttttaaaagaggagaaaatttatatctgggttaagtgtttatcatatatatgggtactttgtaatatctaaaaacttagaaacggaaatggaatcctgctcacaaaatcactttaagatcttttcgaagctgttaatttttcttagtgttgtggacactgcagacttgtccagtgctcccacggcctgtacggacactgtggaaggcctccctctgtcggctttttgccatctgtgatatgccataggtgtgacaatccgagcagtggagtcattcagcgggagcactgcgcgctatcccctcacattctctatgtactatgtatgtatgtattattattattgctgccaagagggtctgatggcacgttgtggggtcggggggtggggcggggaagtgctctaacttttcttaaggttttgttgctagcccttcaagtgcactgagctatgtgactcggatggtctttcacacggcacatttggacatttccagaactaccatgagatggtttagacgggaattcatgcaaatgaggggtcaaaaatggtatagtgaccccgtccacgtcctccaagctcacgaccttggagccccgtggagctggactgaggaggaggctgcacagcgggagagcagctggtccagaccagccctgcagcccccactcagccggcagccagatggccccgcaaggcctccagggatggcccctagccacaggccctggctgaggtctctgggtcggtcagtgacatgtaggtaggaagcactgaaaatagtgttcccagagcactttgcaactccctgggtaagagggacgacacctctggtttttcaataccaattacatggaacttttctgtaatgggtacaatgaagaagtttctaaaaacacacacaaagcacattgggccaactatttagtaagcccggatagacttattgccaaaaacaaaaaatagctttcaaaagaaatttaagttctatgagaaattccttagtcatggtgttgcgtaaatcatattttagctgcacggcattaccccacacagggtggcagaacttgaagggttactgacgtgtaaatgctggtatttgatttcctgtgtgtgttgccctggcattaagggcattttacccttgcagttttactaaaacactgaaaaatattccaagcttcatattaaccctacctgtcaacgtaacgatttcatgaacgttattatattgtcgaattcctactgacaacattataactgtatgggagcttaactttataaggaaatgtattttgacactggtatcttattaaagtattctgatcctaccactg

SEQ ID NO: 275 - protein, 864 aa, Homo sapiens
MTADKEKKRSSSRKEKSRDAARCRRSKETEVFYELAHELPLPHSVSSHLDKASIMRLAISFLRTHKLLSSVCSENESEAEADQQMDNLYLKALEGFIAVVTQDGDMIFLSENISKFMGLTQVELTGHSIFDFTHPCDHEEIRENLSLKNGSGFGKKSKDMSTERDFFMRMKCTVTNRGRTVNLKSATWKVLHCTGQVKVYNNCPPHNSLCGYKEPLLSCLIIMCEPIQHPSHMDIPLDSKTFLSRHSMDMKFTYCDDRITELIGYHPEELLGRSAYEFYHALDSENMTKSHQNLCTKGQVVSGQYRMLAKHGGYVWLETQGTVIYNPRNLQPQCIMCVNYVLSEIEKNDVVFSMDQTESLFKPHLMAMNSIFDSSGKGAVSEKSNFLFTKLKEEPEELAQLAPTPGDAIISLDFGNQNFEESSAYGKAILPPSQPWATELRSHSTQSEAGSLPAFTVPQAAAPGSTTPSATSSSSSCSTPNSPEDYYTSLDNDLKIEVIEKLFAMDTEAKDQCSTQTDFNELDLETLAPYIPMDGEDFQLSPICPEERLLAENPQSTPQHCFSAMTNIFQPLAPVAPHSPFLLDKFQQQLESKKTEPEHRPMSSIFFDAGSKASLPPCCGQASTPLSSMGGRSNTQWPPDPPLHFGPTKWAVGDQRTEFLGAAPLGPPVSPPHVSTFKTRSAKGFGRPDVLSPAMVSNKLKLKRQLEYEEQAFQDLSGGDPPGGSTSHLMWKRMKNLRGGSCPLMPDKPLSANVPNDKFTQNPMRGLGHPLRHLPLPQPPSAISPGENSKSRFPPQCYATQYQDYSLSSAHKVSGMASRLLGPSFESYLLPELTRYDCEVNVPVLGSSTLLQGGDLLRALDQAT

SEQ ID NO: 276 - DNA, 27405 bp, Mus musculus
  misc_feature (1)...(27405): n = A,T,C or G
cggccgcctctccttgcccgggtccccgttttcccccggcgcagtcctcctccggtgggcgcctccgcacctcggcgcaggcggcacggccctcgggccgggatggatccgccgggaagaggaagacaagccggggcgttgagcccctgcgcacggtgccgccgcgcgtagtgggagcttactcgcagtaggctctcggtacgtctcggaggaattgcttttcggtgggagtcgggacacctaaggggaagaaggggtcgtctggggccgataggagggcattcgtcatcggggtcgtggtgggtcgagactgggtgggggaggtcgtcggtgcccactgccaagggtagagggggtccaggcaggtcacctaagagctccatagctccgacctgagggtcctcaagggcgacgataaaaggtctaccgggacgtgaaggaaggagccggggagcgtggatgcgggaaaagactggagcatctctggggggtttaacctggggtggttattacaggatgcggaggcggccgcaaggaagaccccgctccaagtccttgagcttttaataaatggttctttggtgctgggacttgggcattcgagtagctgaagcggagtgagtttgtggagagggagttgcattgacagaaggatgctgaggaacaacgtgaatacccttggtttggttctcaactttgaaggctatgggggtcagccacgagcttttggcatttttttattttggtgttccaagcaaaaggtggctggctgctggacttcgtcagtgattccttattttaaattgtatgtatatatttgatggggttgggcagttaccagttctcctggacattcttccaactacaccttgacattcttacagcagcttctcatctacaccggaggcctgctcctttcaaagttaacactaggctagactgtcctattacgatttactgacatttatcctagaagacgattaagtcatgcttgcttttaactgtttctttacagggccgtgtaaaattgaactgcatgttctatagaagtttaaaaatggtttctctttaaggaatgaaatgaaaaagatgctggtgttagaaggctctgctaaaatgagctcgagtgttctaacagttgggaatttagtcaaatgcgtactttaatcttaatagtctctcggattcatagtccctttttgaaatcggcctagcaacggaaggaagacacagcaggaagcggtgactgttgtctgaagttcacctttgtgattgtcctgcagggatgttacctttttcatgtctgtggactagaaagagtaagctgagaattgcacagctagtctgtagtctcctgttaaactcacacctgtattactaatttcatacatttgttgagtttcctatggcttacaaaatgaaaactcacttgattagggagtccttaacatttagggggaaaaaatctgaaggctactttgctggctaattaaaacatttctgcaaaaaagtgctaatatttttaatggttcttcccagttcttgaaaaagtagtggttaattatatatttttcttcttattgtccttgaattttaccgtttgtccttagggagaatgtactggcatacaaaacagcagcttaaaatattgaaacataacaccttttgacattgtaatggcttctgcatgattcaccttgagaatcatctctggcgagccagcagtggtgggctttcccttcctcttcagttgggagtgggctggccgtctcctactgtgggcctaaagcaaaacagtttactggctgtgaagtaatggtgataactttcacaaaaagagaatgagaggccgatgagtcatttctttccgagctggaagagtagaaggtagagatggttatcctgtggatcgggaatcgaggcccagagcttctgaagggactgagttgctggttgctttggagcaggattggagggcctgaccctagctagagtgtcgtccacttagtcttctactttatcccatccatcgtgattgtttctgaagacacctagtgccagcgataaatgatttccgggttattgtgatactgttccgttgtaatgatggggaactttgagtgctttctacacgaagtgatacagaactgcataagcttttatttgaagttaaagacaattattagcattattagtgaaaatgctaagtttcttctcattgcaaagagacaaaactgtcacccagattaaaatattgcatgagcgtcttagatgaagcaagtgttctattttgggctaaaattaatagaggcttttagaatgcaaaagggtttttgtattttaagtgaattgtgtgagaattattttctaattgtgggattttcttaggtcgaagtagatttcagttcctctaaaaggaagtagacttacataattatgaaaatataatttatgccatagttgtaacagagacaggagttgtatttcagccacttaacacgcagctgccctggttgggtgtggtgcccaagtaatcaatactcacagcacttgggaggcagaggcaggataggtgctagttaaggggcagccaagggctacatagtaaaatcctgtctcagaagaaaagaaaagacaaaggaagtagctaccttaaggcatgttggtgaggattaactgtgcctagcacatagagagggcacaataaatactagacattattttctgtgttccattaggtttaattatgatgtatgccttttttttttccctccttggtgctaatgctttctttcaggctataataaaacaaaacacaaaacaaaaaaacccaaagccctggatgagtacacaaatggaaccatcactacctgactggacatttagtggagaggacaggcttaccttagactttaattagatctccatgtcaagttaatgtgtccatttctctgagtggtgggggacgtttaggcagtgctaccccaaaagtgctcctttggcaggtttctggatggttcctccacgtgcacacagagagcagctgtgagaagctgtccttgtgtgcaggggaacatgtaaagaaatctgttgatgaaataaacagttactacagcttccttaaggccccgatctctcctatctggatctgtgagaggatggctacctcccaatcactgcagagtgtcacatactctgaaaatgctacatagctttgggggctcttcttggaggttctttctatgtgtgagacgacagtctttgttctgaagtgcatcccccttccaccctcccagaacctagtaccctccgccccagtttctcaagccccccccccccctcttctctcctgtccccactgctgactagaatctagagcctcaggcatgctaggccagccctccaccagtgagttaagtttttcttctggccctttcttgagcctcatcttttctgtggcacccatgcatgcaggttctaagtgtgtgccattcctctgctcatctgtcttttgatttatttatttatttatttattaaatagattccggtactaaaccttgggtctgggaggagaataccctttctccagtatctccgagaaaccctcattccaatttcattattccagattgaaagagtgttgatgcttctttgtaggtattctgcagaaagcccagagttctagagctttctaagtgagctcagataagggaagaagagtttataaggcctgttactgactgcaactactttctgctaattgagcaatgtagacgaatcattgaaccctgttgtctgttaatttctcatcaacattttacatatttactgtatgtgtgtatgtatgtgtgtaagcatgtgtgctgcttagaggacacctggtgggactcgggacttgtcacctactgtgtaggtcctgggagcggagcccaaggtgtcaggcttggtaccacaagtgccattaactgctgagccacctatccttattaatggaggttttttgtttgtttgtttgttttaagctttcctcattaattatttgggtagctccaactttaaaaaataaagttcttttactttgctgtaactcaggtccagctagtattatgaccttgtggtttggcagatgtgacaggtgggggagttaatagctattgttagcaggccagagttgcctggagtcacctgagagtcagtcacctggaacctagggttatagttgtctttcacttttatagaattttaatgtttgaagagtgaccggctcctaatcttttgtttattgtaaagatgataattttatcacagtttcggttatttgttggattcatgacttaatgggattctatagaaacaaaacaggttttctttgggtttattacatattcttgtattcaaattacatgaatacattgattagttaaatatgattttagaaggcatcaaaaatacattaaagtaaaacaggcactcggtcagttctctctcactaggttggagagagagagtatgtgtgtgtgttgttgtgtgtcattgagcatggtctgtcactcagggtgcgtggctgagtagaccatccgcgatgcttcctcagcttcagtgaggttgttggagaatgcatggagcagcataaagcccagtgagttcttcatctgcactggccaggtgatttctttgttaggaaaaaggggtctttggatctggttagggaaggacaagtcttggaagggtaattaggctagactattggcccgtgttaatagtgggtaaattttacttgggtagtttaagtgaaaattagttgcctgccttgaagaacaattcaaataaatgattggaaagagaccataatgacacggttccatctccacacattcgtatatgcggtttcaatactgtggggaaccaaaatatgccaccccaaaatatacttccttggcatatttagaaagactgtcgacactggaagagttttaaagagctgtctttttgtagaagaaatttccatctataaaataaatctgccctggtaaacagtgctgcactcgaggcttcttcgagtctcccttatctccttaaggtggatctaggaaagatcgtatccggaagagagattagaggactacagctccctcagacagattgccccaggctgtcacctagtcttttgagggcagcaccttagagtctgtctgcctaactacacacctgttatcagttgtacattctccttgctccactgcagccccacagggttggttgccacctcctccccaagcccttttgtccccgtgctttaggatattatgtaaacatcaatccaggggccttctctgctacactttgtcttaggcctgtagtctgctcttttcagccacaggtccctcatctgtagattcaaccttgcattggaaaacactgtggggaaaagtctgccctgtactgaataggtatggagtgttcttcctgttgcttgctctctgacagtccagagtaagagccattggcactgctgtcccttattagtgtacacagcagctgggaatgtagctcaggtattgtagagtgtttgcttagcttgcatgcaaaatggtggatccccagcactgcctataaatagggtgtgggaatacatctataaacctggcaggagtaagaagactataggttcaaggtcatcttcagctatgtaaaggtcaaagccagcctgagggacatatgagaccctgccttaaaaaaaaaaaaaaaaaaaagaaagaaaaagaaaaaccagaagaatgcatacagattatatgcaaatgctatgccatttcacttaaggagcatctacacactctgagtggggtggggatggggtgggggtcctgggagctgctcctccccggttgttttagatctaaaggatctctaagcatcacatagaacatcaggctgtttacaggagactgcagtctagcttacccttcattagatcagtagaaggatcagcttcattttacattttttaagtaatttaatagactggctgtggaagttgccagtatagagccagtgccatccatgtgccgttcccggtggttaagtccggcagcaaggaggggcttaggaacaccccttggtgggttttcatgtagtctggggagcatacatttggatgaagatactccaaattctgtttctaggacctggcttgtaacccaggaaggggatccagaagttacatagatggcttccttgaaggcatttattacagttgttgttgcaccagaaagtccaattatatatcaagagttgttgggcatgcttctggaaacagaggtggtattgtgcacagcaatgattatcaagaggtttccatttctttagctattattctacagctcctctttcccttcatttgctaacaattctgaaaggtgggtggcattatccaatttacacagaggaattgactcaagcacattaagtgactttcccaagacagctattacgtggtggatttgggaccaagtctcaagtcttttgatcattaatccttaggatattaaaaacatctcttaatagattaatttaaggcttatggggtacttttaacgtcttgcctagagagtgtatatagatattgtgagaggactatagacagggtttaaattattccctcccccccaccccatgtgagtgagtgtgtgtgtgtatgtgtgtgtgtgtatgtgtatgtatgtatgtgtgtgtgtatgtgtgtatgtgtgtgtatgtgtgtgtgtgtgtgtatagctttaggttgctctgatgactctttaacttagtctggccttgaactcaagagatcttcctgcctcaagctccctactgttttatttttaagaacgtggcaggatagacctgtaatcctaacattcagaggctgaggcaagatcattacaaatgtgactccagcctgaggactacatagccatagaaaacctttgctcagaaagaagggggagttggaaggatggcccaatggttacgttcactggctattcttctagaggacccaggttcagttctcagcacccacatgacagctcacaaccatgtataactctagtcctagagaatctgatgccctcttctggcttctatgggcaccagggacacacgtagtatacagacatatatgtaggcaaaacaaaatttttaaaattaaaaatttttaaaaaggaaaaattcttttcaagaaaaactagagatggtttgctgtgtagttttgccctttaaagttggtaggtcggtcttggccacccgtaaaatgctgctttggttgactgtgaaattgtgaaccttaatgattgttaccaaggaaaatgatagttagtagggaaggcaccgaataggaggactgtctctgggtcaccggagtagtgagtgtctcagggcaaatgttaggcttgcactgggacaggcagaagatgccccgactgaagaggggcttgagcagagcaggtggagagagagggaggcgaggggactatttcagcatgttagaggagccctgagcctccaaatagtctcaaagctgagagcaaccacaggaaaggaccagagcagctctcactgtacctggtctcttacatgtgcttgtgcatgctgtgtgtgtggaagtgagttcgtggtgaccgagtaagtgtatctgaaaacaccctgtgagtttcaaatggcacgcatgtgagagcgctgggtaagaaaccctgatgctcttgaacaggagccgggtggggggtcaaaggagcaaacacctggggatggggacactttggagaccacagtccaggagacagatgggaaaagaattgaattacgcgttcatagaaggtcacaagaatgtcacaggtctgtaaggtagcagtggtaaggaggtgggaggaggagccatcgtggagtctcctcttagtggatgcagatggtgctaacacagctgtgagaggagctaattgcgagttggctgcgttgtctgattgtttcttcactcattatttctgcacagggctagctaatggctttaaatagtagaagggagctcgtaaaaataaaataagccagcctgagttactatttattctgtattattaaaaatgaaagggcacagtgtgtttaaggagatgggtaaaatttgagcttcctaaatgagtatgagaagaaaatgaagacgttagacttgatccaaggtggagcaggaatatagtgcagtattaaagtttggggttttatctggctatgtgcgttgaaaagtaaggctgtttgccttttttaaaaaaattatggccatagaggtaataaatataatattctggagggaaggagagtgtagaccttacttaccagtaaccacatatggcaagatgcatgagggaattcggtgaccctgtctgacctctcactaggacattgcaattgaggatgtcattgaagactgcctttgtataagaaagattatctgatagcctgagtcaaggaatttgtgatggaatggaaatgacacctgggttttgagaagtataggaaatagtctctagacttgggttagctggggtggtagaaattgagcataagctagccagcttggcagaagagttccacatgtaaactccagagtggggagtgttgggtttacatgtccacagatgatttttaagtaaatcatggcacgaccaggataccagttagcatttaagtctagatcaagaatctggtcttgtttatagatacaattgggaaagcatttagtttgttgctgaaaaatcgttagtatggcaaataataagtatagcttctaaatgataatgtattcggaacaaaaaaaagtcctagcacttgaattcacaacgataaaattaaaaaaaaaaagttagaaaaaaatttttttcgagatagggtttctctgtatagtcctggctgtcttggaactcactctgtagaccaggctggccttgaactcagagatccgcctgcctgtgcctcccaagtgctagtattaaaggcatgcgccaccactgcccaacctgttttttttttttttttttttttttttttggtaaagaattatttgtttattttatgtatataagtactctgtagccgtcttcagacacaccagaagagggcatcaaaccctgttacagatggttgtgagtcaccatgtggttgctttgagttggggttctgtgagaaataaggatgggtagacagctaggaactaaagcttggatttgaggctcccacgagcaacttagtagaaagctgaagtgaacaggatgagaatgtaacagcagcttacactcagctgacagctgtgtttcttctgtctgataacctgtttatagcctagacagcattgattagctatgtgcagtctaaagcccaggtctgtccttcattttgttactatatatctctataacagtgaatcttaaatttcattgacttggaagttttatgggtctcaaaattctggtttagtaagttcgtagagggccaggtgagtctaacacacacagaaccattcttaaggatggacagatagtaaagagacagaattacaagggtttttttgtttgtttgtttgtttgttttggtttttggttttttgtttttgagacagggtttctctgtgtagccctggctgtcctggaactcactctgtagacaaggctggcctcaaactcagaaatccgcctgcttctgcctcccaagtgctgggactaaaggcatgtgccaccacacccggccaaaattacaagttttggtcattgttttcattaaaaaaaaaagaatcagaatcagaagtatagtatacatgcagtaaaatacaaacattctaagtatactttttaatttttttttttacttgtttcatgtatctgaggctggctttgaattttgacccctttgcctccacttcccacagccaggcatcacgggtctgagccacagagcccagcctcagttccacactcagttaattatccatatgattaacaatttccttcagtcccaaagatcccttgtgcctgttccattcttgttttctcttttttacacacctgcagccaatgttctgctttccccccagtataaggcgagtctcaaagctgcagagggtggctcaggataaagtccttgctgtataagcatgccggccggagtttagacccctaacatctatgtagaaagccaggtatgactgcatgatcagccagtgtagatgagagggcaggcatggggtcaaccagagaccctgtctcagaaaagaaggtgaagagcagtagaagaggcctgatcacacatggtgtgcacgcacaggtgcctgtgatgcacaccccgtacacaccacatgtgatatgtgtgcacgggcgcctgtgatgtacaccccatacacaccacatgtgatatgtgtgcacgggtgcctgtgatgtacaccccgtacacaccacatgtgatatgtgtgcacgggcacctgtgatgcacaccccatacacaccacatgtgatatgtgtgcacaggtgcctgtgatgcacaccccatacacaccacatgtgatatgtgtgcacgggcgcctgttcctgtccaccacatacacactactaagactagtgctgttgtagagtttagtgaagggagtggtaggctgcaatgaatacttttgatatcttttcttagggccctctttgctccttagggaatacttagaagtgcagctgtacttgaagtagagtttctgaggtggatttgccactttacagtctatgcttgttaacttctcagcttgactggctcaagaaaggcccaagagaatagaaagctcatctccagagagaactgtttaagggctgctcaccctgcatgtgggcagcagtgtcccctaggttctgggtcttaaaagaggacagtgtgggttacctcctggtgcgaaactttctctgatgggtgacttgtgatggcattggctgtatgtcctattctccatattctggccacggtggggtgaaacctagaaagcaatgatctaaagtaaatgtgtccccttaacgcagtggctctcaaccgtcctgatgctctggccctttaatagagtttctcatcttgtggtgattccccaaccagaaaattatctctgttgctgtttcataactgctatgttgctactgttatgaatcacaatgtaaatatctgtgtttcccatggtcttaggtgaccctgtgaaagggttattctccccacagagggactgacgcatggtcgagaaacactgccttaaggtgttttccctgggtatgttgttaagggcacaggaaactgacgacataccctctccctcagagagttgtttatatcaggccttccccactggtctagctgccatgttggggtcgctcattgtggtttgaacttcactttcctggcagttattgataattgagtactctgtcgtgtgctcatggggcatctgcatgtcatctgcatgttatcatttgtgaagcatgtgttcaaaacggccaactgtctgtttgccgagttttagtgtttctttccgtctgtggtatctattcatgctggtgccttctgttgtattcgtattttcttgtatgtnnnnnnnnnnnnnnnnnnnntacacactactaagactagttgtgctgttgtagagtttagtgaagggagtggtaggctgctgctagtttcctgggtcctccatagcaatggagggtatagatctctgtttatttagatctaatttcttgagcagtactgtatactttactgtggaaagtgtttttttttaagtttgtaagatttttaccttcatatctatatttctcaactcttctcagagtctcttgtgctctgccctgcagcttgtggctgcacaattcttcctgtgtctgaccctagcatcttaagcatatggacctggaaagtcactttagtgactcagattcctatacttgcaatgtatagaacatcttagaaatctagagaatgtgaatattgagagagataaaagaatgtagttgatggacaaatggactctagggtggcggcattcgtccacccattcaaaaatggctgtgatgtgaatgttctagaatacattttctttagctgttgcagacctggaaacttactgtgcctggaaaaataggtttttagtttaaacaaacgtagtgaatacttaatatagaaggcagcctatttttacattttattaaaattagatggtgtcaaagagtgacagtttagtatctgccagagaccacagctcattcccgtcctcaaggttggagacagtgttttcgttttctcgatcggtagactttgtgaagggccgtgtagttgcaggaacgttgtttactatcttgagcttctattttcatcagaatactgacaagacccagctactttgtagactcttacttatgtgtatggcactggggttgagcgtgtcttgtgacatcccaggtatgaagtgtgttcccacagagctgtccctgtccctgttttactcactcagagacaggatttcatttaattgcctggggtgggcttgaacctctgctgtagtccaggcatgtcttgagctcatgatcctcctgcctcagcttccaagtaggactctaggcctgtatcattaggtcacttatctcataagactgctctgaggactaactagagtcattcaagtcattccagtaaagcaaatgtttgctttgtccttggctgctcttcagtaattgttaggattgtttgttttctgaaggtgggaagggatgtgttaggtgtctaggggaagtgggagctgggagctggggacgaccaagatacgttgtgtacatgtatgaaatctgcgtttaacaagactgttttcttcctcttagaaggctcaggtctgaagcgggaagctgatcttttattacagatattgctggcgccgtggaggtgagagaatgctagtgctgcttgattcttgtgaactgtaacgctgcttccataggctgagagagagctctgttagtatgtatcaagaatctttgttttaaagttttgttacctccaaatatagaccatctccttaggatactttttcaaaaggaaatatttaaagtacaatgaagaaaagcacagtggaggtaaaatcatctgcattaacagctttctagaagtttctgttacccgtgtttcccaattacagcctctgaagataaacaaagataaagtcgaaatcatcatgatggctaccccagtgtcccatctgaaagtcgagggatggaattggggcaggaacacagcagtatggttcacaagaggacagatcctgttttaagaggttgatcagttctgtcatgaaggtacattcctgttccttccaaatacagtgtttcccacgacactgaagggaaacggcagctgcagctttaatggctttgctgttatagaaacttctctgacattaacgagaacagtttttatacggtaggtgagtaaacgaacttcattccttttctttcagatggaagattattgacagtaattaattattggaagcttgatgatcactaatttgccttctgcctcgggagttctggattggggcgctctctggcaggcacctagagcaaaagagcattcagtttctcttcctaaaaagtccgatcaagctttcaaacaactggctattcagacccaacacgttctctgcagtgtaagtagggatctcgaggcagttttctcattggtcagtcagacagaactgtgagttgtagctcagtagccacccacatatctatcatattatatcagcagtgatataatcagaaatcagagccaagaccagaccagaagacccgggctccaatgccctttctgtgtttgccatatacaacctggatgtagttttctatatctcacctggtgttgtaggttattaaaaacagtataagattgtccttccttttggaacatatttttctgtagaggtgaatttgaggtctccaaaatgatctgaaaagaaaagaatgagttgcgatattaattgtaagttcttttagaaaatcagcacacagacaccagagcatgatgtaggtgtgaaaacaaagttgtatgttggatggccgggtgggagagagaacgactggagtgaaccgtaggacggcagtcagtgatacggacacaagtgctgtgctgttacacattctcagagaagatggtgtgggaggactgagggtgctcggtgctcgggtgctggagaaatctaagaaagtggcaaagactccacgaggcagccaaagtggagagagagagacggggctggggggaggctgctggataaaaaatggggtgtaggaccatgtgcctgtgtctgcagttctggggaggcagagtcaggaggcttcctaagacttgccgactgccattctaacctaattttagggaagtgaagggtcaaagacaattcaaaacgtaaggcaggatagttaagggcaataactggagtggaattctgatttcttgacatagctaggaatatgcagaacggggacaaaattcatgttgttgattatagaataacatcttagagtacacagatgtaggattaagtgtcctgaattagagactttctgcttttatttagagcagggtcttagagcttgcactctctgccccgggctgtacccgcagttggtgttacccagtgtcacatccgcttatcttctcctggaagtagtttatctgtaaacatgtctgtatacaaggcgatgcacttgctgtcactggccagttccctgtaacttgctgctagcccccagggcctcctgagactgaggttcacagtgacggaacctgaacctgtcattactcttgccactgattgtccaccgcatctgacctgtccggtgccgaggactcaaatgccacccgctttctccttggaaagtttgaatgcttctttcatttattctgcattttacacataactgtgggtttataatataaaattaacttggtatatctaagatctacttctgttttaaatagcacatttttccaatttgaaaattagtactcatcaaatcaaatgtttagaaattaagaaaaataaaattacaataatcaaaaactatgcagagatcgtctcagtggtagtgttccttatctataagttttttgatactttaaatctatttttatgtcaggtacataaatgttttgcctgcatgtttgtgtaccacatgtgtccctggtgtttggaggccagaaggcatcagagtccctagctggggttattgatatttgtgagctgacagatggatgctgggagatgaacttggggaagggcaaggcctgccagagccatggatgctatgtgtactatgtgtgtcagagccacgtgtgccatgcgtaccacatgtgccagagccatggatgctatgtgtgccatgcccggctggctagagtgtcttcagtcctactgactacccatgctggcctcagactttaaactcctcctctattggtcagccagcactcacagaatcatgaagtcttctaaccatcgtgctctttccttctaatgcatttctttccccatcacatggagatgtcttctgtctctgatgtttacaatcataatttaaactatttttattttttaaagcaagatcttaccgtgtggtttggttgaactgatgcttgcctgctgactgctgactgcacagggtgagcggccgtgctcggcttgtcaccactttttttagtggcagatttgtgtatgtttggttggttggttgctttgttttgttttctctgtgcagccctggctgtcctggaacttgttctgcggaccaggctggcagaggcttggcagcctctgacttcaagcccatcctcatctgcatagcaaggtctacctacgtagtcttggggggaaaattgttttttcccattgcttctcagcatttgatggatcaggttttgtttctgttaacaaactaaaggtttttgatgatcccgtttcaaaataagatagttgcccggtgatgcataaaacaaaggaaggggtttgactcggggattgtatctgtaaccttagctagtctgcttctgcacatggtgtaaatgaatctaaaacatctcattttcctttgaccttcccagtccctccctccgtcagctctcagttctctgctcttacggtgggagagcagctggatcactaggaagacataagacaggaacccccagtgctttcttcctgcgatttattgcaagtgaagttattagcagctacttatttctctttagaactagaatttgggctggaagtgtattatccccacgtctgtagatgcgcggtaaatgtgtcctaagccattttagataaagagtaaaggggaaagcgtcgtcatcagaagcgcttgagggcttagccatgtcttttgtggttagatgggacactttaggttgctggcattatggagagaggaaacagtcctgcgagtggatagtcacggtattctgtatggcttagcagtcgggtgcgatgagctcatggtccccacgagacgcttttctggactcaagatactcaccaggttctttaagcaagttacttgctttgctgttcggctggtttgtttcttaaccgccctttggtggtatgcggggcccagggggttggggtggggtgggggggctgaggttggcgtcttatgccctaggatgagtgacctgattataccactgagtgcatgtagatccggtgctcggtgaaaggacttgacttacctccctgcatatggaagaccaaggcaggagaagctcagcaaaatctctgcagatacccagcagcctttgctttggatacccagcagcctttgctttggatacccagcagcctttgcttctgctcctaacaccccatctcctcttatacgtcagaagcaccacactgtagaaccccgacctacacttgccttgtatcatgttatcctggtaacatgaggtggtaattgttcctatttttagatggcaaggttgagtgagacatctcacacagctaatgaatgcttgaatatgacactgggaccagctaaatccaaagcatgtgttccttgtgttagagcctagcagtgaggctggccagataaacatttcagtgactggcatgcttattagtctattacacaagatactttaccagaaagaacaaaacatacataacctgttaggattttatgttttctagatgtccagcatcatagactgccatttaaactgtagcagtgttttatagactaaaaaggaattctcaagcgcctgcacacacacgcagaaaagagagtacggattatgttgttggaccttgtccaggtctgcacagattagccatccgtagtttatgttgtagacgagctatacttgaactgctaaggaacgcgctgaactcgcaacagtctttcctgggaagcgctatagacgcttgaatgggtgatggacatctcagtctggcaggtattatatatgggaagatattgacgtttatggtgtggcctgggagaagcaaaggggaaaaaaccaaagccctgccgatgtgaagcagcagtgcggtggccggggcctctgctgtgctgtgccgcgtggccggagcctccgctgtccagcagtggccagagcctccgccgtgccgcgcggggccggagcctggagcctccgccgtgccgcggagccagagcctccgctgtgccttgccgcgtggtggccggaacctccgctgtgtgtcctggagccctgggctctgtgtgtgtgtgctttctgaagttcctatcactctgtgttgctggtctcatccacctcatgtaagagacacactgagaagctgaaatgtgacctggcgagtgcagcctcccctccagccccttcaggcttaactatttctagcctgtgccttttccttcgcttgcctgaatcaacaagcaaagtgctggcttagtgtaagaatagtatatgaggtgggcctggagcttcctgcctcgtgacactacactgtacattagaagtaggagagtaaatttaagaaatgaaaaatgtaaaattacttatttttttttaagttagaaaaaaatagaccttaaattgaccttctgtcatcaaaggatgttattatgaagtccatgtgacactgtgactcttaatttctttcttcttttcatttattttttttaactgttatttctcttgaccagcatagaaaaacacaagaacttcttaagtatcatttctttgagttgggcgtgtgctagcaaacacattgttagcatcagtgaacttggtatagatgattagttctagcagtagcagaacattataggtgtcttgcagtcttattcaaaggattttatagtagatggggaattgaaaccagaatgttcagggctgggaaattatctcactgaacaatgctttttctactgtgcacaagacttgggtccaacatccctcctcagcattactgggagaattaaaatgaagccagaacatctatggtagggctgtgaataaaagagcatagtagggctgtgaatgccagatcatagtagggctgtgaataaccgtgttcttgggattcgttttatcagatcgtcagttcattacatctacagtcgagtaggccaggggtttttggagtgcatttgcagcctttgtcacattttagtgctaaggcttatgccgggtaggtaggtagaacaatcttaggacaggcgaaggccagaagtccatgtcgggtgtttccttatcacccacattctcctttgaggcagagtctcttgctggacctggagctcaccattttgctagactcactggccagttacatatatatgtttaaataatacattgtggaggttgtatgaaagataaatttataatgtgtgtattaatgtgttagatctggttttgagatttttgttgctagaaacgctcttacatctcatgagttcacttcatgtgctcctgtgatcatctcaatcatagcatttcagaagttagatcatcgtctttctccaagcccaactggctcacggtgttctgccttacctgtcctgtctctgaaaaagcgtctttatcaccatttgcccaagttatcctgccactcctacttctccattctgcattctcagttatcagccttctaaacatctcagcttcatctctgctgtcagagctcttcccccacacccccaagacagggtttttccatgtagccctgccttacctggaacctgctctgtagatcaggctgacctcaaactcacaagagatccatctgcctctgcctcccgagtgctgggactaaaggcgtgcgccaccaccgcctggctattacttgctctcacttgggctctgcacttgccttcagtgtggtccagcttagccctgcatcctctcagtacagactacaaagcctgcttctctgcagcttcctcctagtgctcttggccttacctgctaggctgtgctgactttagcgttgttcgtgctctgcactttgctctatccgcctctctgtcccaatccattccttcccattctgaacatcacctccccaggatttcctgttcaccagccccgaagacaggttctcttcctatgatcatgagacgttgtagtacttaatcgtgctatcactatggacctggtgctcagtgagcaaaggctcttatctgtcacaatctggaccagttgtccatagcttaataaaatgactcacacattaaaatctagctcattttagcaaatgtaatcaccctgttatcagcctttgattagggaaccagttccagtgctgagatgaggtcactggttcgcaagtcccgactttctgtctcacagaactctgtccacagtgtaccagcttcgaagccagttgggaatgctcttgatatattctaaatttagaatctttatagatctttggtacgattcttcaattcactgaactattttcattgaggattctaaagtcattcaccttaggcttgcagtcctcccacactccattatggcagtcagcgttaattacatcctatgatttagtctaagaggcgcaagcagatttaggatgcttaactaactcagtatagctcagccagggctccacactttgagtgcatattcagtccatttattgatagatcgtgtgcactgcagtgttgtaacctggggcgcgggggctgaatcatatgatcatttaagcctttaaagcattgtttatgtggatcgcttgcatgtgtttcactaatattagacagcagtgtccacgataattagataacacagaccagatcacagcatagtgttgagacgatgaaaaataagtgttttgaaatagttctcagatccttctgaagtgtttataaatatgacaggtcatacatcgctagaactgtgggtcatctttaatggtagtattaatattgtattgtcatttccaaatgctaaaatgcctaaagaatagcagatacgattcccatccacactggcgtggaaggaacactggagtcactgtaatcagtcctagggcccagcttttcttgtcattgtagtgctgattcgtgtatgagagactcactgagctgagtctgaccattttgagccgtggaggagagatttgagttgggctctagtttttctatccactgtgatgtgcagtgttttaaaacatactgaaactatgtctcataaaacctggaatagtcccattgcatcgaactcctggaaacgatttcaattactttgttttttatagaaaatgtgtactagatactacttgatataaagggagtctttgtactgtttaggttttttaatgtaaagttttgtagtactggaatttgatttgattctacttaaagctgatttattgcttattatattaaatacaagttttcaataaatgccatttaacttaacaagtcattataaaaccaatttcaaattataactctttgaggaaaatggtaactatttagaatattgtcttgatagagttaagcatgtgtggaaatgtgaaaggctagaatagaccttcactttcattccagaagctgatccatttgacacttagccctttccttcagtcctgtgtcgctttgtataaaaccacagagtggaagggttgtgacgaagctccaaaagctccaaaccgagcacattttcaaagatttagcagcagaaacgcaaatgtgacattaagatatttggaatgcattttttttgcctcaactattaatcactatcaacacttttaagtttgccgctgttatagtcccaccccagtagcatttctacattaaaaacaaaacaacgcagcagcagtctccactgtcttcccaaagtcagtctgtaagcaaaagaaaacagtattttgtcaggatgcaacctggggtgcctctgcattgcagtggcttgcgtgttccatctatggaaccagtccaggggtcccaggctagaagctgccttgttctaagtttcctcaagactgtagagttccatcttgcaggaagttccttaaccaggaagggaaacaacttgaaagagcacccagaagtccctgaaactgaccagattcactgttgacagaggaagcaataagagccgagtccccctcggacgagtggagtcaagctgcagactgtgaaaccagactagcttcctagaaccagaaaccagctgagcggcctggaggagggttagccagcacaggcacctgggaagggcacgctcttgcctgttgagcggcctgcaggctgtgcagggcgctccaggttcccagcttggtgagctgtcacccatgctcgggtgggccttggtgatgcagctgtctctgactcatttctgcttctgtcagtaacccctcacctataggcagaaagtccgagcctacttgtgggttttgaatacccaccagtccctgaggtcaaaatcccaccaattatatagctctccccaagctaaggacttgaaatttcaccatctccaccctggcaaactccccgaatgccctccataggtccccctcccctaagaaacccctgtataagcccacctcctgctcacttctccacagcatcttgcctgagcagaggcagccatcgtcttcttgcctttttcctaataaatcacacgtgtgaggtttgctcccgactgtcaggatacttcccttcggaactgcaacactgtatagaggaagtctcccccctcagagctgtagcccctctcatatttctgtgagcaaccccatagtgctcatggctcaccaggtacccatactctgttctgtcatgggcttcctagctgctgttagtagatgtgtattgtgagtctcctcaggaaaaggtttgtcaaacaatccttgtgcgctctggcaagggtgcatgtattctgcatgtcctaattgttcctgtagcttatgaacactgtatcagatgtacaggttttggtttggtcatcctgtaaaacagttgcttcttcctgtacggtttgctcgcaagggaagttaccttttgagagcaaaaggaaaactgctgcagacacaggaaggtgttcagcactgcggtttcttgagtacaactcctgttgtgttgagggtggcacatcacttgttacgtgagtcctcgagacccctggagtccacttaggggtcagccaactttctgaaaaggacatgggtggggtggataatatggttttgtagatataggttctgtgacatgttgtttgtggggcttttggtccatgtcttgactgtccacccgaacccccacaaggtctcacaatgtagacactgactggctttgaactctcagagatccacctgccggcctctgcctcctgagagctgggagtaaagagacccactactatatccagcctgtttgggggctttaaaaatctctttaaaaatttaaaactgggggctggagagttagttggctcagtaacccctgggttttcttccagaggagctaggtttgatttctagcatctacacagtggttcacattacaaacaccagttccaggccatcaaacaccatctcctggccttcatggacactgggcacacacatgtatacacataaagacatatatgtacatacacacactacacatagaaatacatttttaaaaattttaagactttttagatcaagtctttacaaaaactggtcacaggccagatttgttcaggttgaccccacctctcctgcagaagttggaaaccaaaaccaagtctgtcagagagtataaaaggaaatgtatttcagaatattctattgaaaaggaaagaggagggatgggtggtgggcattataaggcagcacagcgaatgcaaaccttccacactaagggaagatgcacagtgattttattttcagaaaataaacacaggtcacagagaacacgagaaattagtatagtgctagttttcagaagctgtgcttgaagctatagaatagtggggtgatacctcagacctgccagggtaagggatttcctacttgggattttcttctgaaaggatcaaaaaacaaaacaaaaaacccaagaatgaagtagaatggttccattgctggaataacgtaaagggacatccaggacagcactgacacccactgctgctcttcactgggggttggtggtctgttggaagctcagtagataccaggaagcccgagcaaataggagacgacagttatgtaggggaaggaaacactggtatgagaagagagacatgacctacctccacatgacatttgtttgcccgtagtgaaaacagtaagtagtaatttaaccggaaaatggactttaattgttttgtggaaggaaatgttgagggaaagtccatgctgtgtctaacaaatcaaaacccatcatcttcacattgcggagccatcaagtaatctctaatcctagaagtccagagcacacctacaaagacaacagaatcaccagagacacacgcaccaggactgtctgtgattagcacttaggagcagagagctgagatctcagtttaacaagaagactgagtgataccaagacattggaagccgagttagtgttgagggttatgaaattagtagacactaactttgctgtgagcctcctccacatacttccagcgttaaatcctctgaaactacctttcagatagatgcaatatttcttttgttggtgttgccattcaatcaagaacattgttgatccagtagctttttctattaaaaatgagcatggagatacttaattagttttaagtaatgaatattctctattgttcttttaactctggaaaagacaagctcgtgagatggctaggtgaccggcagttgagacttaagtaggttttcccagttcttctaacagcttgctcatcattgaagtaggatagtgtgtttgtagtcttaggcgctttttgtgaagtaccatagactgccttaagcagggctggggtgtagacaccaggtgcatagtttgtacgtctgttttgctaattgctacagtgtcacagccctgtgctaattgctacagtgtcagccctgtgctaattgtgactgtcacagccctatgctaattgctacagtgtccttgccctgtgctaatcaagtgccttagccctttgaattacccctaatcttactcctccgacatgaaccctttagggacatccttgccttgaagccaaaagtattatagtttttttctttaccttttcctgccttttcaaactgcttcttcagaatcgggataaactgatgcactgtggagtggggagggctgaaaaatggggctttaacaagataagcctgagataaacctgtgacaggcagagcatcaaggagttgataagtaatattaacttttagactacactgtgcgtatgcgtgtgtccatgtgcttgtgtgtgctcacacactgtgtgctgtgtgtgctcacacagagattaaaagacaactctgaagactgggttctttcattatgtgggaaggaaggttgaacttgcatcatcagagtaggcagcaaagcaccttgattcacagagccatctcaccaaacctacaacttttgaagtaaggtatagctttcccctttaactgtctgagaccattcagttcctggaaataaggagacacaattcagtatcataacgaagttcaattactgcctggaaaatggaaagcagagtttgagatggcttatttccttccaattaattcagttctctgaaaggaaatgggaagtgagcgggcctgagtggtacccaggcccactgctgcccctgcttaggtgtggttcttcaccctgctgcccatgtggttcttcaccgagttgtgcctttcctagtaggaaggaaaacaactgcacgggcctctccatgcccatttttaatagaaaaagctactggatcaacaatgttcttgattgaatggcaacaccagcaaaagaaatattgcatctatctgaaaggtagtttcagaggatttaacgctggaagtatgtgggtaagcctgcaggaggctcacagcaaagttagtgtctactaatttcataaccctcaacacttaagtcggcttccaatgtcttggtatcactcagtcttcttgttaaactgagatctcaattttccagctgcacgggcctctcagattagttaaatttttttctgtttttttttttttctttagctcttctaatcaatggataaagtggggaaaatgtggaacaacttaaaatacagatgccagaatctcttcagccacgagggaggaagccgtaatgagaacgtggagatgaaccccaacagatgtccgtctgtcaaagagaaaagcatcagtctgggagaggcagctccccagcaagagagcagtcccttaagagaaaatgttgccttacagctgggactgagcccttccaagaccttttccaggcggaaccaaaactgtgccgcagagatccctcaagtggttgaaatcagcatcgagaaagacagtgactcgggtgccaccccaggaacgaggcttgcacggagagactcctactcgcggcacgccccgtggggaggaaagaagaaacattcctgttccacaaagacccagagttcattggataccgagaaaaagtttggtagaactcgaagcggccttcagaggcgagagcggcgctatggagtcagctccatgcaggacatggacagcgtttctagccgcgcggtcgggagccgctccctgaggcagaggctccaggacacggtgggtttgtgttttcccatgagaacttacagcaagcagtcaaagccactcttttccaataaaagaaaaatacatctttctgaattaatgctggagaaatgcccttttcctgctggctcggatttagcacaaaagtggcatttgattaaacagcataccgcccctgtgagcccacactcaacattttttgatacatttgatccatcactggtgtctacagaagatgaagaagataggcttcgcgagagaagacggcttagtatcgaagaaggggtggatccccctcccaacgcacaaatacacacctttgaagctactgcacaggtcaacccattgtataagctgggaccaaagttagctcctgggatgacagagataagtggagatggttctgcaattccacaaacgaattgtgactcagaagaggattcaaccaccctatgtctgcagtcacggaggcagaagcagcgccaggtgtccggggacagccacgcgcacgttagcagacagggagcttggaaagttcatacgcagatcgattacatacactgcctcgtgccagatttgcttcagatcacagggaatccctgttactggggcgtgatggaccgatacgaggccgaagcccttctagaagggaaaccggaaggcacgttcttgctcagggactctgcacaggaggactacctcttctctgtgagcttccgccgctacaacaggtctctgcacgcccggatcgagcagtggaaccacaacttcagcttcgatgcccatgacccctgcgtgtttcactcctccacagtcacggggcttctcgaacactataaagaccccagctcttgcatgttttttgaaccgttgctaacgatatcactgaatagaactttccctttcagcctgcagtatatctgccgcgcagtgatctgcagatgcactacgtatgatgggattgacgggctcccgctaccgtcgatgttacaggattttttaaaagagtatcattataaacaaaaagttagggttcgctggttagaacgagagccagtcaaagcaaagtaa

SEQ ID NO: 277 - DNA, 623 bp, Mus musculus
ttgcccgggtccccgttttcccccggcgcagtcctcctccggtgggcgcctccgcacctcggcgcaggcggcacggccctcgggccgggatggatccgccgggaagaggaagacaagccggggcgttgagcccctgcgcacggtgccgccgcgcgtagtgggagcttactcgcagtaggctctcgaaggctcaggtctgaagcgggaagctgatcttttattacagatattgctggcgccgtggagcctctgaagataaacaaagataaagtcgaaatcatcatgatggctaccccagtgtcccatctgaaagtcgagggatggaattggggcaggaacacagcagtatggttcacaagaggacagatcctgttttaagaggttgatcagttctgtcatgaagatggaagattattgacagtaattaattattggaagcttgatgatcactaatttgccttctgcctcgggagttctggattggggcgctctctggcaggcacctagagcaaaagagcattcagtttctcttcctaaaaagtccgatcaagctttcaaacaactggctattcagacccaacacgttctctgcagtgtaagtagggatctcgaggcagttttct

SEQ ID NO: 278 - protein, 61 aa, Mus musculus
  VARIANT (1)...(61): Xaa = Any Amino Acid
MITNLPSASGVLDWGALWQAPRAKEHSVSLPKKSDQAFKQLAIQTQHVLCSVSRDLEAVFX

SEQ ID NO: 279 - DNA, 1821 bp, Mus musculus
cggccgcctctccttgcccgggtccccgttttcccccggcgcagtcctcctccggtgggcgcctccgcacctcggcgcaggcggcacggccctcgggccgggatggatccgccgggaagaggaagacaagccggggcgttgagcccctgcgcacggtgccgccgcgcgtagtgggagcttactcgcagtaggctctcgctcttctaatcaatggataaagtggggaaaatgtggaacaacttaaaatacagatgccagaatctcttcagccacgagggaggaagccgtaatgagaacgtggagatgaaccccaacagatgtccgtctgtcaaagagaaaagcatcagtctgggagaggcagctccccagcaagagagcagtcccttaagagaaaatgttgccttacagctgggactgagcccttccaagaccttttccaggcggaaccaaaactgtgccgcagagatccctcaagtggttgaaatcagcatcgagaaagacagtgactcgggtgccaccccaggaacgaggcttgcacggagagactcctactcgcggcacgccccgtggggaggaaagaagaaacattcctgttccacaaagacccagagttcattggataccgagaaaaagtttggtagaactcgaagcggccttcagaggcgagagcggcgctatggagtcagctccatgcaggacatggacagcgtttctagccgcgcggtcgggagccgctccctgaggcagaggctccaggacacggtgggtttgtgttttcccatgagaacttacagcaagcagtcaaagccactcttttccaataaaagaaaaatacatctttctgaattaatgctggagaaatgcccttttcctgctggctcggatttagcacaaaagtggcatttgattaaacagcataccgcccctgtgagcccacactcaacattttttgatacatttgatccatcactggtgtctacagaagatgaagaagataggcttcgcgagagaagacggcttagtatcgaagaaggggtggatccccctcccaacgcacaaatacacacctttgaagctactgcacaggtcaacccattgtataagctgggaccaaagttagctcctgggatgacagagataagtggagatggttctgcaattccacaaacgaattgtgactcagaagaggattcaaccaccctatgtctgcagtcacggaggcagaagcagcgccaggtgtccggggacagccacgcgcacgttagcagacagggagcttggaaagttcatacgcagatcgattacatacactgcctcgtgccagatttgcttcagatcacagggaatccctgttactggggcgtgatggaccgatacgaggccgaagcccttctagaagggaaaccggaaggcacgttcttgctcagggactctgcacaggaggactacctcttctctgtgagcttccgccgctacaacaggtctctgcacgcccggatcgagcagtggaaccacaacttcagcttcgatgcccatgacccctgcgtgtttcactcctccacagtcacggggcttctcgaacactataaagaccccagctcttgcatgttttttgaaccgttgctaacgatatcactgaatagaactttccctttcagcctgcagtatatctgccgcgcagtgatctgcagatgcactacgtatgatgggattgacgggctcccgctaccgtcgatgttacaggattttttaaaagagtatcattataaacaaaaagttagggttcgctggttagaacgagagccagtcaaagcaaagtaa

SEQ ID NO: 280 - protein, 534 aa, Mus musculus
MDKVGKMWNNLKYRCQNLFSHEGGSRNENVEMNPNRCPSVKEKSISLGEAAPQQESSPLRENVQLGLSPSKTFSRRNQNCAAEIPQVVEISIEKDSDSGATPGTRLARRDSYSRHAPWGGKKKHSCSTKTQSSLDTEKKFGRTRSGLQRRERRYGVSSMQDMDSVSSRAVGSRSLRQRLQDTVGLCFPMRTYSKQSKPLFSNKRKIHLSELMLEKCPFPAGSDLAQKWHLIKQHTAPVSPHSTFFDTFDPSLVSTEDEEDRLRERRRLSIEEGVDPPPNAQIHTFEATAQVNPLYKLGPKLAPGMTEISGDGSAIPQTNCDSEEDSTTLCLQSRRQKQRQVSGDSHAHVSRQGAWKVHTQIDYIHCLVPDLLQITGNPCYWGVMDRYEAEALLEGKPEGTFLLRDSAQEDYLFSVSFRRYNRSLHARIEQWNHNFSFDAHDPCVFHSSTVTGLLEHYKDPSSCMFFEPLLTISLNRTFPFSLQYICRAVICRCTTYDGIDGLPLPSMLQDFLKEYHYKQKVRVRWLEREPVKAK

SEQ ID NO: 281 - DNA, 112608 bp, Homo sapiens
cgcagagcgcgcacccaagcggccggacctccccgactcccgggccgcccccgtctcgcgccctgcctccctccttcggccttcacctacccgcctccggattggccgctaggaatcccgcccctctaaagccctgcctgctattggtcacggtaggctgcccttcagagaggcgtgcccctgcccgccccccgccccccgccccgggaggtattttccattctggtgggggttggggggaggggggaggggaaacgggtgaagaaggggaggcggcagggaagggggtgggggcctggcgggggcatccggcggagctggggtccccgggctccgtccggaggaagcgacgctgcgctcgctgggcagtcggaggggacgggacgcaccggagggcaggcggactcgccctgtcggtgactgcgccgtccgggcccgtcctgcctggccgcaggtgccctggatgaggccgccccgcgcgccccaaacggtgagtgtccccgcggtcgcgcccggcccgccgcctgctccccggcccccgcgccgtcgtccgcggccgcctctcggtgccccagtgcccgcgcccggcgcattccgcccccggctgtcgcccccgcaccgcggcggaggcagcgccggcctctggctgggatgggctggccgggaaaaggactgctagcccgggccgcgagccccgtgcagaccacgccgctcacagtgggagcttgcgcttagtaggctctcgatgcatttctgtggaattgtttttctggttggaggaacgtggggttcctaaggggaagggggtcgtccggggccagtaggagggcatccgtgatcggggtcgtggtgggtcgcggggaggccaccggagactgaagcagttacacaggctgcagggaagggagcaccgaccaagtcacttggggctccaagagcccgatctgggggtcttcaaggtcgaggagaaaagatcctcttggggatgagggagggaaccaatgagtacatatgtgggaaatgaattgagtgccccgggaggtttaactaaccaaggtgggtaagggatgcggaggcgggagctggaagacccctctgcaactacttgggctcctaagagtctttgatgtggggtttgggcatccgagtagcagaagcggagtgatttttgtggagagggaattgcatttaaagaaggatgctaaaaaaacagtgtaaatacatcttggtttggttccgaactttgaaaggcttgagggattggagtcacaaggaaattttgacattttcttgtggcattccaactaaagggtgcctggctgctggactttgtcagttatcttttattgaaaaatatatgtgtatgtttgatggtattctatcagtcacaagtttttctggaaattatcataactacaccttgaaattcttgtagcaacctctctatccatagtggtggcttacttcttccctatttaacgtttagaatggattgtgctattatgtactactgacttttattctagaagactaataagtaattcacattctttcttttccttactttcgtttctctacaagatgatgcaaaattgaactacggattctatataagttttaaaatattttaacttgtgttgactgggaaggaggtggtaagctagcagctctattaagcaatactaaaatcaggttgagtttcttaacaattggtaatcttaatgtcagttgtttagtttaattttaataatttttcctttatatagcactcttgagaacatagaaaatgcacaccgggtttaggcagtggtggtctccagagtgcacctccatggcagtccgtggcggttcttcatttcactgagatctttaatcttatgaatattttcttaattttatatatgttagtaattttttacatttgtagcgtactttacggtttacaaaatgaaagctgattagtacttaaacatattttggaaaaatttgtatatcatattttggcccttttatccatcagagaaaacatttctgcaaaaaggtgttaatattttcagttggcaccttcttagttcttgaataactaatggataattatatatattttctccttattgtccttgaattttactattcgtcctcagggagaatgtactggcttacaatacagtagcctaaaatattgaaacctaacaccttttaacattataatagcttctacattattcaccttgagaatcatctatggcaaaccagtgattagggaagctttcccctatcacctttgtttagattgggctgttttctccttttgtagaactaaggaaaagtaagactcactggctgtgaagtagtagtaatagctaaacagaatgagaatgggaggcttggaaaaaagatgtatgtgtatgagtcacgtttcttctagagctggaagggtagaccatggagatgatattttgcagattaggaaaccaaggcccagagcagttgaagggattaaattgctatttaatggtggggccaggattggtgggcaggtctgtggactccagtccagagattgctttatcactttcacactgtttatttctaaagcattctcgtgccaactgttaatggtttttggattatttgtgatttgttcccttctaaggatgaagaagtttgagttgactacttttatccatgaaattttgtaaaactgggtgagcttttatttaaaagtttaaaacaatatgctgcattgttagcgttagtgctgatagttccctgtcattggaaagagacaaactgtcatttaggtgaaaatattaaatgaatgccctagagtagtttagcattctataatttttatgctaaaattaattgcttaaaagattttcaaaattcagaaggcttctatattttgaaagtaaattatgtgaacattattattttcagttagtgtggcggttttgttaaaatgggtttagtacctttaaaaagagagtagaattacatgatcattatgaatacatcattcctatcatagttataatagagaaagacaggatttgtatcccagccccttcacatgatcttaggcaagtgatttaaccactgtgtacctgagtttactcgtttgtaaagggagggtgttaaaagtacctacctcacagcatagtggtgaggtttaactgtgcctacctactacatagaaagggtacagcaaatattagacattattctctgtggttcgttagatgtaagcaggcagttgtgtgcccatttatttccttgctgtacacgcactttcaagttacaaaaattcctagaaaaatgcacgatcaaatcatactctttggtaagggggtacttggtacaaatgatgctctgatttttggtattgctctccttcctctgcttaccttggacctttaattaggtctgcatatcaaattagagtgaatgtgttactgtttctgaatgtcattgggagatccttgttgcagtttcattattctagaacaaaaatattaataattgatttgcagatattccagtgaaaatacagtactagagtactagagacctgctgggtacacttaggtgaggaagtcaggaatttataaggtctattattgatctcagctcttctctgccagtggaaccatgggaaaatcattgaaccctgttttctattaaacgaatattttgatgacttcattcattaagctgtgagattttagtgataaaatgtgtgtgactccaattttataacatatggttctttttaatttgctgtaacccaggtccaactagtgtcatgaccatgtgttttagcaaatgtttttgacggtgacagtttgagttataagttatctcagaatccttcttaatggtgtatcacttaaagaatggtgaatttctcttggtgttctgtgcttctgccttctcaggtttttctgttgcttttgtaacagcccttcttccatttgtggtcctttcaactttgattctcatgcatctttgtggtctttccttaagcatctttgccttctgtcacaatatgtaacttcttatctgtcatgcaagagctctattttaatgagtatgttttaacattcattttcattattttttcaatgtatctcacataatgtcttttaattgcccttatttgtagagtttcattgaagtgagtattttacaggtgagggattaaaattagaaacaagctatagctcgaaagcaatgttactgtactagtaatagtcttgctattgttttagatctcaggcaggcatgctgttggtggtacttcagatgataaatacctgggccagctattgagtccaaagtgatgctagcagggctaagaaagccacatgtagccatcacaagttttcacagttttttttttttcactgatacagaattttagtgtttgaagagtgaccaatttctaatattcttttggttaactctcataataaggattatgaagttaccacaatttattggacatttattgcattcatgacatacttttaggaatttcataggtactctcttcaagtctattacataatctaatcatgtgaataaattagttaaatatggttttagaaggcatgtcatgttaaaatataaccaaccattgctcattttttcattaggttggagttttctttatacatttaaagataattatgccattgtgaatggactgttattcatatttaaaattcatggttatgtgaactgagtaggtgtagactgtacaaattactttcttagtttcagtgcagttgttagagaatgaaagagggaaaatatgaattatttgcattgtccatcttaacaaattcttcatctgagtcagccagctatcctactttcaaggggagtggggagggcttttgaatctggttagagcagaagtaatcttgaaagggtaattaggctggattgttgactcatgttaatattggataaatttgcatcttagtgacctgaaaattagttgcctgcctttacatgtaggtgaaaaattgtagggaatgatttcagagagaccatactgtattatgaaatataatatagcaagaatatattttcacagattcatatgctgcttaacaccaaaattaaatttaccttactctgatgagctttcatacagtaatctttttatcaaagctagtaagaggaagcagtgatgaagataatttttttaaaattgtatttgaaatgggcttatgtgctctgggattgtctttaaattgacttccttattttatttgaagatgaccataaacaggaacaatgtccagtcttcctattctgagcagtatccttgagttagaagtatttcaagcaattttaaagggtggaagcttatttaaataatagatatagggaaaatggaacaatgagaactccaatgatggaatggaaatgatacgggaactgcaggttagacctgcgtatatggtaggtagttggaggaaggggagttaggatgagaatcggaggctgggtagagaaaagtgttgaggtaaactgaattttgtaggaatttagccctagtgtaaatcctgaataccacaggttggcacgtctttgtatcaggatgtaatactattatgtactgtatacagtttgcttttcggtggtggttcctggctcaacacaggtcttgtaagcctcatcatttcttaagtgactagagcagaaagaatatcttttgttgaagtagttggcctcttatccttggttcctgaagcagctctgaaacagcttctgagcaataaaggtgaaagatagtcttttgttatttacaacaagccctttcaaacacacctgggcatatgttaatgaggctatttttggaaagtccctaggtaagcactgtttggaggtgttgatactccagggaaatcagcattgggctctgagggttggcactttcaactccacctcccaaccactggggagaagagaagggccagacatttaggggcttccaggaaggtgaacaagaacacatccatgtgctgggaagatggcacactccaacaccatggggacagaagttcctgcactccagaccttgctgtaattgtcactatttctgactgtttatttgtatccttaaaatatgttttgtaataaccagcaaaagtgttttaaaacacttttacttactttacagtgtttccctgagttctgtgagctgctctagcaaattaatcaaactcaaggagagggctgtaggagccccagtttatagccggttggtcagaagcacaggtaaaataattgagcttgggattggcatcagaagtggggctcagtcttttgggtctgggtcctcaacctgtgcaatctcacgctgtctctaggtgtagctggtgtcagaattggtttgaattagagggcagccagttggtagctgctttagaattgattacttgcttttcggtagagagaaatccctacacatatgttttgaggtcacaaaagtcttctgtgttgattgttgaaggacagtgtgaagaaactgagtttgttttttcctagattaccagacaggaaagcgcctgaaatatgcttaacgctaaaggataaacccactgaatgttaaatataatctgttaaggagaagctcaagcactttcttatgggttaaaatatgcatgtggccaaaggggagctcatttatctaattatttagtttttgacattggctatttacatgagaacagcagtccaaccccattatccttcaggtgatcagtactgggatgagttttatttaacatttttataaatgatttaaaagacggactggcagtgacagttgccagatttgcagctgactccatgtgctgttccaggtagttaaaagccaagccagcaaggagaagctacaggaatatcctctgatgagttttcatgtggcacagaacaagataatgcatttaggggaagatattccaaattatatttataggacctgaattgtgacccaggaaggggatccagaagttatgtagatgacttccttgaaggcatttattgtggttgttgccgggccagaaagtccaagaatatgttaaacattgttgggcatggttctgaaaacaaaaatgatgttatataaaaattataaaggggttatcatattttgactgtttattatgttccaggctaagtgatttattatgactgctctttcatttaattctcttagttcagaaaggtaggtggcattatcccattttatagaagagcaagtttgacacgggaaggttaagtgactttcccaagtcagcccatgtgtggtagagttgggactaatgtgctagtcttttgattgttaatcctagacatttcccaggatattaggaggcagcacttaaaacttgtaataatttaatttagggtttgtgaagtgctcttttactctttgctatggtcggctttggttgtcattttaccacaaggatggtatctaaatactttgagaggatttagagacattccttaaattcttgatttttaaggaaagctaggaatgtcttggtgtacagttttagtcacctctggtgacccctgacatttctccccttgactttataaaatgctgaatggttacattaataaaaggaacattaattaacaaggaaaatatcgtttaatagaaaagtcaccagaataggagtccagagacctggattgttctagtgctataaagtagtaatgtgaaaaacattaggatggcatggaaataagcataacattcttcttgccctggaggtagaggaaagcttgaactgtcttgagagatcagccggtgaagaggggttgtggattgcaggcagagggaatagtagtatattagatgagtcactgaacttctttgaacttcagtttcctcaaaattgagataaaatataagaaagtaccaacggcagcatttgattttggaatctcagagtgagattataaggatcacgtgagtaagtatatgtaaaaatgctttaaaaatttttaaatgctgtacaaatgaggatggaggaatactgatgttcctttgaagagtggacaaagaggatgcagtgaaaatttaggtggcaggactagcacagaaggtagaggaggagaagtggggaagggaggtgttaaagatgagaggaaaaggacaaatgtggagaaagttgaattatggttctctttgtgcctgtcagtcaaaaggtgggtattacatctataacggaagaattttaacatcaatttactgtaaagtggaagctcaggagatagttgaaacgttttaatcattttcatttagtctgtattgaccatgttaataaggctatgaaaataagctaattgagagttggtgtgttgtctgattgtttcttcactcattacttctgtataggtttagctaatgattgtaaatagtataagagcgctcataaaatgaaataagctggactgagttactatttattgtagatgattagaaatgaaaggacatagagtgtttaaggaggaagatgctatttgatttttctaaactagtgcaaaagaaaattaggaaatcagactaggaccgaggcaggaggggaacaaattgtgaagggttttgtatgtagccatataggagtttggatttttatttagttttatagatgggaagtaacacaaacacttttgtgttttagaaaattgatcatagcagtcataaagagaatagtctggaggagaaaagattggagacatttaccaaataattactgagcaaatacaaatgctcctcgacttacaatggggttagtcctgataaacccatcctaagttgaaaatatcattaggtcagaaatgcatttaatatgcctaacctaccaaacaacatagcttagcctagcctaccttaaatgtgctcagagcacttgcattagcctatagttgggcaaaatcatctaacacgaagtctgttttataataaagtgttgaatatcttatataatttaatgaatactgtactgaaaatgaaaaatagaatggttgtgagtttaaccaaattgtaagtcagagactgtttgtaatacacatggcaaggtgagtgaatgaagcaattctctttggcttgtggtagatagatgacagtcaaggatgacatttaaggctctgctctagttcaagaaagagactaattatatgatggtctgaattaaggaatttgtagtggggttggaaacaagagcactgctgatttcagagatacttaaaagtttgagtcctccagattttgttaatgttagaaggtgttagaagttgagtatgagtctaaggttcctggcttggcaatagaataatatatgcaagtttgggagagagagaatactgagtttaatttcagataagtaataatgctttttaggtaagtaatgataccacaatatcagttggaaatacgggtctggatcaggagcgtggtcaggattatagatatgattttgaaggcatatattttgtagctgaaaattatgaaaatagatgagtaatgcccataatatctaaatgataatgcgttcagaacaaaaagtaactgccattgctggtacttagttcaagagtttcataatatttacctattacccattgccaccccaaactctgttacaaaaaatgtagaaaaatatttgctgccagaaagccagaaatatttgagtgtccttgaaacactgtaccagttgggatctttcttcctgccttcggaatcctggctagccatccagtacaacacaggattcttaggcaaatgcacttccttatccctcaactagagtttctttttggaatccatgtttgcttctttgggctggtgaagtggtctctgaacagatactgaatcctgaagcctttttttttttttttttttttttttgagatagggtctcgctctgttgccaggctggtatgcagtggtgccatctcggctcactgcaacctccacctcccaggttcaacagattctcctgcctcagcctcccaagtagcggggactacaggcatgcaccaccacgcctggctaatttttgtatttttagtagagatgaggtttcaccgtgttggccagacggtctcaatttcttgacctcgcgatccgcccgccttggcctcccaaagtgctgcgattacaggctttcaccttctttactatctattccagagcatccctaagcaactagcactttgcctctttgcctctttacctttccagccccttagagcaactcaaagagggaaaaataaaaacagcttgagagaagaggctgtaatcttttcagttctcccccaaaggttctgctttctaagcaaaggatggagttaatttgtcataaagatgaggtgtccaatttcagtaaaataaatgtgtctgttaggaggaagatcttcaagtgctgaagggaatttggaaagaatctgacttaggtggtgtttagcacttagtggaaaagatgagttttgggtttggttttagaggaggtagaaagacaaggctgtgcagagaaaagtaggaataacactattaggagttgggaaaaacagtaccaagaaagtaatagaacattaagggtggagcagcagggggaagtgaaggacctggtgaacaagatttcctatctaaaatgcctattttgagttgggattaatgagaaatttgggtagttagatgattcaagactaaaatttggaattgcaactccctaaagcactgagtagaaaattgaacatgaacagaggatactataacataatttaaatagcaatttaggacttcagtgacaactgttatagtttatgatgtttgtagcactgattacttaatttacatactattttaaaatcccttgtatctttttgttttctccttacatacttctataacagcaattcttaaactttcctagacatgagaattacctggggctcttttttaaaatacagatttccagtctccaccccccatgcttgaattctggttcagtaaaagttaaggcaagggttcaagtgattctgatatatgtagtcctcagaccaaagtttaggagatactgttctagagggtgggcaaagagtaaggagatagaatttcagtttttggtggttgttttcctttattttatttatttatttattttttatgtagcatctcgctctgttgcccacgctggagtgcggtggcgcaatctcggctcactgcaacctgcacctcccaggttcaagcaattctcctgcctcagcctcctgagtaactgggattacaggtgtgtgccaccactcccagctaatttttgtatttttagtagagatggggtttcaccacgttggttaggctggtctcaaactgctgacctcgtgatccacccacctcagcctcccaaagtgttgggattacaggtgtgagccgcagtgcctggcctcctttaatttttttaaaaagtggaagtgtaatttacatatagtgaaatacacagatattaagtgtatgtacagttgcatacaccaaatatctttaataaccttaagaaatttaaatgtccacttgtgaaaaaaaactctaagcaaactaaatatagaagagaacttcttcagtctgataaagggcatctattaaaaacctatagctaacatcatattcagtggtgaaagactgagttctttctacactaaaaaagaaaatttaaagatctaaatagggatataccaggttcaagatgtacctaagttcaagattagttttgacaattaatacatctttgtaatttatgatttctgtcatccagaaagagcccctgtgctctcttcccattgagtccttgctgtttctccttttccgtggctgcagtcactgttctgatttatttcactgaagattaactttgttctagaattttttataaatggagtcatgcagtatgtactcttttgagtctggcttctttttatcagcatgtttttgaggttcatccatgttacatataagaattgttccttttagttgtagagtagtattccattatatgaatattattattgtgggaaagattgtttccagttttcaactgttaatgaataaagctaccatgaacattcttgtataagtctttttgtgacatgttttcttttctcttgggtcaatacatgaagtggaattgctgggttttaaaataggtctatgtttagcattatgagaaacttgcagaacaatttaatttctgagatagttttaccattttacattcccactagcaatctatgagagttctgtttcttattatcatcaatatttggtttagtcatcttactgggatatctcactgtggtttgaatttgcattttccttgtgagtatcgatgtcatgcattttgtcatgtgcttataggctattttgcatatcatccttagtgatatgtctgttcaaggcattaaccagttaccaattttatgtcattttactgttaagttttaggatttgtatattaattggatgcaacttctttgacacataaatgtgttagagatttttcttccagtctgtggcttgactgttcattgttttggtggcatcttttgatgaacaaaagttttgaatttagtggtctattttatcaatatttcctcttacgctagtgtttttctgggtcctgtctaagaatctttgccacccccacagttgtgaagatattatcctgttttcttccagatgctttatggtgataatttttgtgtattgaggtgataattttgtgtattgtgtattggttaagattagatttttgcccccatatagatagctaattgttccaacacagtatacttccctttccgcattaattgctttggcaccttgttaaagcgcagttaatggagtaagtgtggatctgtctctaaactctattctgttcatctgtttgtctttctgccactatgacactgtcttgatttaccatagcattaagtcttgaaataaggtaatagaacttctccagtttagttcttatttttcaagattgtttagactttttttaggtattgtacatttgcacataaattttgtaatcagcttatcaatatctacaaaaaagccttttggaatttttattagggttgcatttgaatctatgaattggagaaaattaacatcttaacatgaacataatatagctctatttagatcttcttttttagtgtagagagaactctttcaccattgtatatgttagctatacatttttcatagatgccctttatcagattgaagaagttctctttgcttagagcttttttttttcccacaagtggatgtttagctttttttttttttttttttttttttgagacacagtctcgctctgttgcccaggctggagtgcagtggcgctatcttggctcactgcaacccccgcctcctgggttcaagcgattcttctgcctcagcctcccaagtagctgggactataggcgcgtgccaccacgcccagataatttttgtatttttagtaaagacagggtttcaccatattggccaggctggtctcgaattcctgacctcgtgatccgcctgcctcggcctcccaaagtgctgggattacaggcgtgagccactgcgcccggcctgttcagctttcttaaaaaatgagtctgcactattgagacgcttatgtggtatttcttctttattctattaagatggtgaattacattgattggtatttgattattaaaccaaccttgcattcttgagataaacttggttgagatgtattgtcgtttttttgtttttgtttttgctttttgttttgtttcctctagattcaatgagggattattcttggtctatagttttttgtttgttttggtatcagagttatgctgactttttttatgaattaggaggtgtttcctcttattttgtggaagagtttggataaaattgatgttcttcgttaaatgtttgatggaatttatcaatgaagccatctggacctgtagttttctttgtggaaagttcttaattaaggaatttaatttataaaagaatgaatataggcccagcatggtggctcatgcctgtaatcccagcattttgggagactgaggtggaaggatcacttgagcccagaagtttgagaccagcttgggcaacataggcagaccccatctctaccaaaaatttaaaaactagccaggcctggtggcgcacacctgtagtttcagctactcaggaggttgaggcaggaagatcctttgagcctgggaggttgaggctccagtgagctgtgatcatgccactgcactccagggtgggtgacagagtgagtctctgggtctaaaacaaatgtaagactactcagattttctttttcttttttatgtctgttttggtaatttgcattttggagaatctgttgaatttatcagcatgaaaataaattataaattttatgaaacaatatttcctttttatgtcagtaggatctattccttcttttattcttgagattggatgtctttttccttttttccccttgattaatctaacttgagaaaggaatatcaatttcataaatcctttcaaagaaccaacttttgacattgctttttctctgtggtttatctgttttctgtttcatgatttgagctctttaattccttcccttctccttactttgggtttaatttgctcttttttccctagttttaagtgaaagcttagatcattgattttcgaaactccttttaaaaaacaattattaacatttaaagctataagtttccctgtaagcattctttagctgcatcccacagatattgatatgatttaattattattccattcaaaatatttttaaattcctcttggaatttatttgacccatgggttgtttgaaagaatgtttccaaataattttcaaatatttggtatttttcaggtatccttttgttactgtgttttcatttaatgccgtggtgatcagagaacatacatactcttaataacttcaaccaatataaactttttgattgttttatggcccaacatatggtatgtcttggtgaacgttcaatgtatacttgaaaagaatggttattttcctgttactaggtggggtgttctatagatgccaattaggttagtctgatcttcttatatcttacatctttactgattttctgtctgtggttctgtcaactattgtgagaggagggttgaagtttccaactgcagttttggatttgtctgtttcttctttcagttccaataagttttgtttcctatttcaagcatagtttacagcattgttgagtgcatgcacattggagattaagtgttgttgatgaattgacccctctgtcatcatgaaatggtcccctttatcccaggtagtttccgttgttctgaagtctctgtctgatacaaacttttcttttgattagtatttacatgatatatctttttcatccttttacttttaacctatttatatcattatacttgaagtggatttcttgtagagaatgtgtagttgggtctcactttttttatctagtctgataatctctcctttaattgatgtgtttagatcagggttggcaaactatggctggcaggttaaatctggcctgccacctgtttatgtaaataaaattttattggaacacagccatgcccccatgccaaccagtggtttagaccatttgcacttaatgtaattttgatatagttgaatgaaactgtgccatcttactatttgttttctgttggctggtgttgtttcttttttccttgattatctgcctgtttttggatggattattttttatgattctattttatctttcctgttggtttgtaacttagatctctttcaatttttttttattggcggccttaattagttaatcgtgatttgccttcaactaatattttaccacttaatgtgtagttcaagaatcataatagttacttccatttcttcttttccatatttcgtgcttttgttgtcatgcattttgagttgaagtgttctttctgctttgtcaggcagttaccttttcaagcaattaaaagtgacaaaaatactgtaatcccagcactttgggaggctgaggtgggtggattgcttgaacccaggagttcaagaccagcctgagcaacatagtaggacacagtatctataaaaaaataacaaaaattagccagacatggtggctcgtgcctgtaattccagctactctggaagcttaggtgggaggtattgcttgagcctgggctgtcgaggctgcagtgagcctagatcatgccactgtgcttgagcctgggtgacagagagtaacaccctgtcaaaaaaaaaaaaaagaaaagaaaaaagaaaaatgtctttaatatttaccttcatttaaccattttttagatctttatttctttgtatccatccaagtttgtgtctagtatattccctttgcttaaaaaacttcctgttacatttcctgtagttcaacattcctctcattttgttttcacttttgaaagttgttggtgtggatatggaattctaggtttttaggatcccctccgcccaccatcttaaagatattccactatcttcttgtttgtatagtttctgacaagaagtttgttgtaattcttgtatttgtttctctgtatataatatgtttttttcctttggctgcttttaagatttcgtttgtatcactgattgacagcaactttattatgttgagcctttgtgtggctttttggaagtttattgagtttcgtggatctgtgggtgtattgtattcatcacatttgtaaaatttttagccatctatcttgaagttttttttcttctcaggtgtctttctcctacagactctaatcccacatatgttcaaccacttaatattaacttgcagtttactgaggccctgtccatttttcttccaatctgtttctttttcctttagtttggaaattttctgctgccctgtcttcagggtaactgatttttttgttaatagcttctttgtctaatttgctgttatgcctgtccagtcaatttttcatgtcagacaccccccctttttttttttttagttctagaagttctcttacacatgtttggtttccacttctctatgaggtatttccttttttcttcattgtgttgatgtttttctttaggtctttaaactcttttctaatagctgttataaggtcttttactcaaatgtcctttacttaccccagccatttcttggtccttattgtagtttattatttatttttcataggcctggtaatttttaatggatttcatgatgttgagtgtcttcatttttttttttttttttttttttttttttgcatatagtgtttcttgattgttgagttttgtcctggcaggcagtttatttatggatcaacttttaaacatttttatttaattaactaattaattaattaagacagggcttcactttttcaccccagctagagtgcagtggtgcaaacatggcgcactgcagccttgaattcctgggctcaagacatcctcctgctttagcttgctgtgtagctggaaccataggtgcacaccaccacacccagctaatattttgacttttttgtgcagatagggcctctctatgttgctcaggctagtcttgaacttctatcaagcagtccttctgccccagcctccccaaatgctgggattacaggcatgagctactgtgcttggccaattttatgaatcaacttgaactttcaagttttgttttcagggttttttgtttggggaatttttgtttgtttccagacagatacggaatagcttttagtttagggcctgtttgggcccaccactgaggtgtgcacttttttgtgtctcctttaatttccccatgtattcatcaaggtttattcatcccagctggttattgatcctggccctgtgtgaactctaaatcgttggagagtgtcccagtatttgttattttcttggacgtttttctttgtgtagcctcatggagttacacaccacatgtatgcagattggtatttggccagaaactcgagaagaccccttttgcatgtttttggagcactttctctgtgtaacttcttcctttgtggttcgatgccctgcaaattctagctgtctcagactttacaaattctgagctctgtcacgtcagcttagtgagactactgactctatttggcttcctctccctgtgttttggttctaggcagaaagctggagcaatcacagggctccccttgcttgttttccttctttaggggatcatgttttcatattgcctcttatctcgtgtgaaaactattgtttggtattttgtctagttttctacttgtttgtaactgcaggacaattctagactttgcttctggctcatgactagaattcagaagtcttctgccttcattttttaaggatattcatgccagataaacaatttcgggttaacggtttttttttctttcaacattttaaggtcatcatttcgtaatcttccggtttatattatttctgatgagaagtcagtggtatttcttataattgctcacttaatgcagtatgtatttttttctcatcccactgctctaaagatttctctttttatctttggttttatgcaattttgtaaattttagggttaggttacctctaatatagaggcatgccttttcagagtctgtgttgaaagcatggggtattcaacaaggtcttttcactctagcttagctgctaggaattttaatgtctcccggacctgtgcttacaagcttaggtagttgtttggttcatactgtttagttgctctttccctagatgttattctttcactggtctgatggagtattgcgtgcacatgtgcagcttagtctctaggcaaagattccggagatctctctaaagatttctgaaactttgtctccacagctcccttcttctagttttgctgctcaaattccagcaaccttagtagcctcaaacttcaagctctatttcctcaactcagtgagattcttgtgttttgtgtgtgtgtgtgtgtgtgtgtttcccctgtatggggtataagcagaaagccagggcatttgtgagtctttgtttctcttttctcaggaatcacaatcctgtgctgcctcttgtccaatatctgaaaataatatttcatgtatattgccgagttttatagttgtttaccgaagatctagcccaatacagtttactccatcataattgaaagtggaagtttaggagtttactttttcttctttttaaaaactctttacagtttttggtatattatactttttagactatggctttatttttaaaaatcatgtcagctcatattttaattttcaagtgatacagagagttacagaagaaattttttaaaaaaggaaaaataactcaatatccccaaacccaaagtttaccagttatatgaacatcattttgggtatcttttattgcacatctactcagaaggataattattttatttttaaaatgccattcatactatttctgatataaggcatttaagtttaattaacagagctaaatttgttaaataaaagcaatatgggaaaaactgctcaaccacagataaatatttactaccagagataatactttctaaaagatttttctctaggcttaagaaataagattacagaaaaagccgaagagcttagagttatgatatcaataattgtgtgctccaataggtctctcacatagaaaagaataaagtattggcaaatatcttgctggtaggaacatacagtgatacagctttctaaatggcagtttggcaatattcagaatccttaaaatgttcataccctttgcccaagtttaatttttaggaatttattataaggaaataagagatgcacacaaatgtgtatgttacttattcattacaatggtatttataatgttgaaaaattggaagcctcaaatgattaggttatgctatagttgtgtaaccaaataccataaaactattacaaatcatgttctttaaaatttttatttagtgtactgttctgattataataaaaataactggcaggagatggaaaattaagagcttttggattttgagggttataagaaactgttcacaatatagtgaatgataaaagcaggatgatacatgtccaatccttttttccatttttgcagatactttagcttgagctttgttgagctttataactagatttaatgaaaggaacacttattcttacactgtacgtgtaatatgtatcctaaactttttccaaactaaggcagtctctcatgtttcatagtttaaaattatgagtttctatcaaacagttctttatgcacttgaataaatttaatattactatctttccttttttctttttttctagagctggttttaaagaagttttgatcttgctttctcagccagtgttcctgcccacttccttgcaggtgtggatgtccttatgttaaagaaagaatggacgtcatagtcttcgttttctcagtaaaatattatgtttgacgtctgtatccctggcatcttaagcatatggacctggtgctctttaggaactcactgtagtgactcagctccacatattttgctatatatagaacatgttggaaacccatagcagaaaattaataattaaaagtcaaagcattgttgtggtgaatgaacaaagaaataggtgtgtccttcagggaagcatcattcataccagacctgaaagaagaatgaccttaacctaagtggtctagaggctattcctcggcagtcgcagatccagaaactcagtttggtcagggcactgattctattctaaacagatttatggaaaactgataaagaaagcaaaggtaatttaaaaaatttatattaagaaacaatatcaagctatgatagtctgatggcccaccttttcattgtagggttatatctgctgaaaggatgtgagtgattgggttcactgatcagagcatgttgttctgaagtcttattatttaacctgagtctcaatgttctcatcattaaaactgtgataaaaacttgtacctcataggattattgtgagaactaaagataatccaagtaaagtgattagtacaattccttgcacatccttgctgttcagtaattaagattgttttcttgtacatctgaatttgaagtcttgaacttaaaggttcacttgatcttgattcctgcagacattgctgggaactgtactgctcttggtgtcataggatactaacattacttcatttacaagaatatttttgttctgaatggtaaaactttaataacaaactgtgatgagtttttgcatagattatgtcttactgtgagatctggctattttactactttgtgtctatggtaagaatctcttaaagaattcagcagtatttgcttttccaatttggcatttctaaaacagcttggtattttttataaaaccagaagtaaaatccaggtagcaaatttagtaagctgtttttactaataactgataaatttgtaagattagtgttctgtggttagtgtttgtaattcattgtatttgtagattgtggtattgtaagggatctggtccaattccctgtttttcagatgagtttacagagaaccagagtgaaactaagctagacagctgatgcatcatagggggtccctgggactgtgaggtaccagtgcagctgggtgcaggacagtgaggcccttaatataagtgtgtgtactctggaggaggcaaggagaggagccaagtcttccttttgggtgtcagcatcctttctttcacacggttctgagaaagcagtattgaattaagcagcaagcttgctgtcccgaggtgcagacatcctgagtgagtccgttctgctcctgcctgctcctgctttcttgattagtcaaatccaaatcagaggtgaatgaacaaatgccctttttgtgtcaggtgtcatgtctactacctagacattacagcagttgagacttatctaagagcattttcatggcagagctgagactcctttgtattgcagtgcctctctactttaaatgaatttattttctcttccatggaagagatttatatgggagacttattaaagaatgttttgacatctatttagatgttattccctaactgtactccatagtactttattatgcacagtcttggtgtctaattatctcagatctgcattgtctcctttgccaagtctctgaggccctgtatcattttgatctctcttttgtatgacccttagggcatgggatattttaagcattcaataattaacttgactagtaggtaaatatttgttatcagttttttaattgcaccaaattttacattttagcataatggaaaacatgaagagctggatttgctacttaaagctcatatcctcagaaggtttaagatagagaagttatctagtgctgttgtcatttaaaaggagcctagtgcttccacattagacttatatttaatacgttaagaattaaaattaggaagagtgagataggtcacttacttaaatagtttttagtcatctggttagtctactaacttttatggcatcatcccaaaatatatgtagttacaaataatgaatagctgtcttctttgaattataatcctctgtgtgttttgttgtactgatttgctgtgggtttatcttggaggaaaaagaaatatttcatgccttcttaggatggttttacagaggggtgcaactgtgaccagtctaagtacttgatcccagtccgcattcaaagtgcatgtttttggtgtcagagggaattaggtgaaaaaaatatggatagattagtataaatctgtaactgctattagaaaaaacaggcacattccatattaataatggacagtattgtcatttctatttcaaggacccaatgaatatctagtatgaatatataatctttatttaaacttctatttgattgtatatactctgtttgctttgtcttaaattctcttttttacatggtgatattaaatatttgtgtttagttgatattaagtgttaatagcctctatgggtggttgaaagatatgcttgtttctcagtctagagtttatacccatgtcatatctttgtaagtaattttttaaagtctccttccagctgtcttcattctcctgtttcactgatgcacacatgctcaaaggatttaagacattttgtatacatttgccagtcaagggggaaaaaatctgtcaaccacgtctccagagtctgctttttcaattagtctgtcattcacatttaacttgaggtatatgtaggccagtaggttagattagtgagtatattcaagctggcttcttttattcatcgtaatgtctttgaaaatcagccaggttgttgtatgtatcaatggttgattccattttgttgctcaagagtattcctttgtatagctgcactaacagtttgtttatccattcacctgttgaaggacatatgggttatttccagtttggagcaattgtgaatagaactgttataaacatttatatatgggtttttgtgtgaacacagttttcatttctctaggataaataccaagggttgggattgctgggtcatatggcatatgtatgtttaactttatcaagagttgccaaactgttttcaagaatagctgaaaacagccccactcacaatgttatgagagttctagttgctttgcatccttgtcagcattttgtgttaccaccactttttattttatttgttcttatgtcattttggctttaatttggatttctctaatgtctaataacgttgaatatttttatgtactcagttgccttccatctgttcttttcagtgaactctgttcaagtcttttgcccatttttaatggctgttatatgctttcttaatgttgaattttgagagttccttacatatccaggatacagatcctgtgtcagatatgtcatttgccaatattttctcccagtctatactttgcttttcatactcttcacattgtctttcatggaacaaaagtttttaatttggtgaagtccagttcataatttttttttcttttatgggtggtactttcggtgtcatgtctaaaaattctttgcttcactccatgtcccaatgattttatctcatgttctgaaagttttataggttggcattctacaaaacattagatctgtgatccattttgagttattgtgtaaggtcttctgaagtttaggttaaggttcatgtattttgtcacaatgattttatctcatgttctgaaagttttataggtttgcattctacaaaacattagatctgtgatccattttgagttattgtataaggtgtgaagtttaggttaaggttcatgtattttggtatatgggtgtccaattgttacaacacctattgtttagggaaagactaccctttctcccttgagtcatcttgcactgttgtcagaaatcaattggtcacatttgtgtgggtctctttctcagctctattctgtttcgtgtatctgtcctttccctatattacagaatgttttaattactgttggtttttatgatgtttttaaaccttatgatttatgattctttcagttttattcctcatcaaaattatttggctattctagttcctttgcctttggtttcagaatcagtttgtctgtatcagtgcaaaatatcctggggaggggttgattagaattgtgttaaatctgtagatcagatgagaagaattgacatctttactgtgttgagtcttccaggccttgaatgtggtagctctctgcttatttacatcttttcttatttctttcattgtgttattagttgtactaaagaagctcttgtacatgttttgttagatttcatatttcattatttcagagctattatgattggtttttaaaatttttagtttctgactgttcattggtaatatataaaaatatgattgacttttgtgtgttgacctgtatcctgtgaccttgtaatcttactctttagttgtaagaggtttgcttggtagattctttgggatttctgtgtaaataaatatgtctgcaaatggagatagttttatttctttctaatttgtctgcttttttttttttcttcttgcttcctttcactggctaggatgtcaaatacaatgttgactagaagtgacaagagtaaatatcattgattccaattatagaggggaaagcatttttcccaactatagagtgaaagcattcaggctttcaccattaagcatgacgttagctgtaggcatgtccttttatgtgatttgggtttgttttgctctttttttcttctagcttcttaaggtggacagttagattactgatttgataagtttcttttttgttaatataagtatttaatgccatacattttcctctgagcattgcttaactacatcatacaaatgatgtatttttatttccttttcagttcgagatattttctaacttcatttgagacttcctttttgacttgtggattacttataagtacatcactaaatatctagatttttggagattatttctgttatttatttgtaatttaggttcattatggtcaaacaacatattttatgttgcttcagttcttttaaatttgttaagatttgttttatggcctaggatgtgatctgtcttggtgaacattttgcatgtacttgaaaagaaagtgtattttgtttgctcttcctgggtagaatgttttgtagatgtcaactagatacagttggttgatggtgttctatcttctggttgatatttttgtctattagatttttgttgcatagttttttgagaggagggtgttgaaatctccaactgtcattgtagatttgtctgtttctccttccagttctgtctgtttttgcttcatatattttgaagttctgttgttaggtgcatacacatttaggattatattttcttggtgaattggccttttcattattatgttgtggctctttttattcctgataattttctttgctttgaaatgtacctatttgataatgatatagccagttcaggtttcttcttattaatagttctatgttatatcttttttcatccttttacttctaacctacttatctcatcatatttgaaataaatttcttgtaggtggcatacaattgggtcatccttttcaaaaaaatctaataattttgtcttttattggtatttttaggttatttacatttaatataattactgatacgtttagatttggctctgctgttttattatttgctttctgtttgttctctttgtttattgttcctcttttcccccttcctgctgtcttttgagttatttaaacagtttttagtactctattttaacataagtatttttccacctaagtgagttgtagaaatcttaacaccatatgtatttctctgccttctttcttgtttgttgtattgtcttttatattacatctacatacatataaaaccccatcagacaattacatagtttctgctttgaacccaatgggtactgtttttttgttttttgtttttttaaacctcagcattcattggatggttaccatttctttgttcttccttaattatagataatacattttttcccttgatatcatttctcttctatcctttagtaactccttcagagtggatctgctggtaatgaattctcataattttacctttattcaaaagtgtcctcattttacttacttccctagagtctgagttgacaattattttctttcaaccctttaaaaatgtgctgtttcctttcgaactgcattgtttctggttagaaatttataggcagtcaaattactattcccctataagtaatgcgtcacttttttttttcttgctactgtcaaaatttttcgtttttattttttacctgtttgactatgatatgtctgggcatggatttctttgggtttatttaaaaatttatttatttatttttttgtagacggagtctcgctctgtcgcccaggctggagtgcagtggtgcaatctcagctcactgcaacctctgcctctccggttcaagcaattcttctgcctcagcctcctgagtagttgggattacaggcgtgcaccaccatgctcggctaattttttgtatttttagtagagacgtggtttcaccatactggccagactgatctaaaactcctaaccttgtgatccacccgcctcgacctcccaaagtgctggaattacaaggcatgagccactgtgcctggccctctttgggtttattctacttggtttctctgtgcttctagaatctgatatacactgtatcttttactaactttgttaaagttttcagccgttatttcctcaaatatttttctccattgctgtctttcactctcctttcaggataccagtgacacgaatgtcagaccttttgatatcccaaaggttcttatggctctctgttcactatttttctctttgttgttcagactagatcatttctaccagtctatcttcaagttcactgactttcctatgtcatctccattttgcttattaagcccatccagtgattaatttcagttacagtatttttcagttctaaattattattattattattattattattattattttgcaatggagtttcgctcttgttgcccaggctggagtgcaatggcgcgatcttggctcactgtaacctctgcctcctgggttcaagcgattctcctgcctcagcctcacgaatagctggaattacaggtgcctgccaccatgcccggctaattttatatttttattagagacggggtttctccatgttggtcaggctggtctcgaactcccgatctcaggtgatccgcccacctcagcctcccaaagttctgggattacaggcatgagccattgtgcccagcctaaaattttcattctgttctatttaatggcttctacttatttgttgagaccaatttgtttcaagagtgttttcccttgttggagccttctttttttttttttttttttttgaaacggagtcttgctctgtagcccaggctggagtgcagtggcacgatctcagctcactgcaagctccgcctcccgggttcacgccattctcctgcctcagcctcccgagtagcggagcatttttataatagctgctttaaagtctttgtcagataattcaaatactgtgtcatctcagtgttggtgtctgtttattgtcccatgcaagttgatattttctgggtccttcatattctaagtaattttagattgcatcctgggcatcttcaatattacattataagactctggatcttacttaaattccatggagaatgttgctatttgtgttttagcagtcagttgagtctgttgggttcaaccttcaagttgcagccagctttctgtgggtggtgatttcaatgtcagtttgttttcaaagcctgtagtgcttcgctgtttgggtctgtcctatatgcagtatcagtctgatactgttccagtcagttcgagataggtggtaatctctctcttagttcagttctcatagtttttggtttgctgtttaggttgagatccatgccatgttcagctctgggatgaagccaggagtttataatcaactttatggattcactttgctgtgagttcctccctctcagcaatttcctttatactttctgctgccgacctcttttcagtccttgagaggaaaagctgggtctttttctactctgctcacttcctgtgattgcacccacatccagggctaagtggtaggagtacagagaggaaaaaaaagttgatggagagaggttgcctactctcttgaaacaacagcttctgggatagtggaggaatgtttccctccctcagagttttaggtacctgtgggcgcctaactgttaactgccaggatccttttcccagtttcttaagcctgaactggagggcttctcctggatctctgcattgatttccacttccaggtttcccccaagtccaggtggcaggatacaagaggagaaaaaagtaaacttaccactggttccatgctaccattgaattttgatattttgccatctacctcccaccatttacttttcagaatctttaaatagctgctccaagcattctggggttttatagctatattcagtaggagagacaggatggagtgtttttactctatcttggtttgcattgaagcaatgtgtactgttaagtatgatattcatttattcataagccagcacacgtagctatcatttgagtgcttactatgtattgggcacttattacatatattatttgtttaattctccaataattttcctcattttaggcatgaggaaatttaagggtaaaactgtttacctgtgtccatagatgttaaatacaagcagggatttttatttcttccttttcaagatagaatcttgctctgtcacctaggctggagtgcaatgctgctatctcagtcactgcgacctccacctcctgggttcaaaccattctcctgcctcagcctcccgaatagctgggactacaagtgtgtgccaccatgcccggctaatttttgtattcttagtagagatggggcttctccatgttggccagactggtcttgaactcctgacctcaaagtgattcgtccatcttggcctcccaaagtgctgggattataggcatgagccaccacgctggccagcgatttgtatttctgacccccaaagcttttccatttgcctctaagccagtggttctcaaagtgtggtaccagggctagcatcgtcagaatcaacctgggaacttgttagacacacaaaatttctggctctacctcagatctactgaatcagaaattctgggagtgagaccccataattcgttttgacaagccgtctgttatcctgatacatgcttaatttgagaaccatttatctgtgctgtataacttcacaagcactatgtgtggtttagtttcttagcaaaaccttaatataagaaactagtttttcaccattgtttgagacatatgctatatgctaaaatctaattttttactaacatcactgacatatagcttgaaattcacactgtgttactcaagataacagtagttaaaatataaatactgtgacttaaaaaatttaaatgtatgcatataataggggatccaaaagtagccatagttgcttaacaacagggatacgttctgggaagtatgtcattaagcgatttcattgttcgaccatcatagacaagactcacacaaacctagatggtatagcgtactatacacctaggccgtatagcgtagcctgttgctcgtaggctacaaacctgtatagcctgttactgtactgaatactctagacagttgtatcacaatggtaagtatttatgtatctaaacatctatacacaaagggtacagtaaaaatacagtataaaatatttttaaatggcacacctgtatagggcacttgttttgaatggagcttgcaggactggaagttgccgtgggtgagtgagtgagtgagtggtgtgtgaatgtgaaggcctagaacattactgtattgtagaccttataaacactgtacagttagtctacactaaatttacttaaaaatctctttcttcaataacaaattgacctttagcttcctttaacttttttactttgtagactttttaattctttataactttttgcctattttgtagtagtacttgttttaaaacacaaacatatacagctgtacaaaaatgttttttctttatatccttattctataagcttttttctgtttttaaatttttagcttttttgttaaagactaagatacaaacacacacattgtcctgagcatacacttggttaggatcatctagacatcattagaataggagtttttcagctctgttatgatcttaaaggaccaccatcatatatgccgtctctcattgacccaaacatcattatgcagcacatgactgtatatgtaaagaaatcaatcttagatacggattttggccaacaaatcacttcacatctggtaactactatgccatgtaatgctcggtattttaagtttcaggatattaatactgtttgtcctagatttcagggtaaaacttttgagattggcttagattaagattaggttggccaggcatggtggctcacgtctgtaatcccggcactttgggaggccgaggcgggcggattgcttgaggccaggagtttgagaccagcctggccaacatggtgaaaccccgtctctactaaaaatacaaaattagccaggcatggtggtgggcgcctgtaatcccagccactttggaggctgaggcaggcgaatcgcttgaactcaggaggcggaggttgcagtgagccaagattgtgccactgcagtccagcctgggcgacagagtgagactctgtctcaaaaagattgaatggcccatatttggagaatgggtcctatttcatacaattttttcccatgaaatattaaatgtataactaaatttaatttgcatattcctagaagacattttatatacacttgctaattgatgggaaaaaatctatcaatcacatttccggagtctgctttattaatcagtctataattctcatttaccttgaagtatatgtaggctaggatatcggattagtaggtatattcagatatgaaggttaattatggaccattgtctcttttgtgttacattttggggtcagaaacacttgtgtttaagtccgagctctccttttactaataaggttggtgggggtttggagcacagcaggtgttactaattctccattgtagaagtaggctttatagccattctttttatattcgattttaagtccattactccattgtgtctgcattagcaagatgcgtaccatctgctggatactcttcaaggagtatcagtactaaggtggaaagggctgctgtagactgaatgttcgtattccccccaaaattcatatgttgaaacctaatccccagtgtgattatataaggaggtggagcctttgagaggtgattaagttatgaggatgataccctcatgaatgggattcgtgcctttgtacggagctgaaaagatgagagttctccttccaccatgtgaggttacagtgagaagatggccatctctgaaccaggaagcaggtcctcaccagacaccaaatctgccagtgctgtgatgatcttagactttcagcctccagaactatgagaaatacatttcttttgtgtataaaccaccctgtttatggtgttttcgttatgacagccagaaaatactaatactaagacaaggaccctgccctcaaggagtttactgtctattgaaataaacaggaaaggacttacgcaaaaatgtgattcttatgacacagatatgtacaaaggactgtggatgtggtatgttggagccaggtttggccagtagaactgaactgttgttggtacatataccacagaaaccagcaaaatactgcgtccagtcagttctgctataatgagatgtatacattcttaaaaatcaccaagtgtagggagaaataagattgaggcacaacccataaaagtttcatcagtaacacatttttaaaagaaataggaacctaataaaaatgatagcaccattttaacagttttacataagagaaacataaaaactacaataaatatggcactttaccttaaaaaagacctgaagtttgcatgtgaaggtagtcatgggaaaagttgcctcttgtgagatactgtgaaatggtggaaggacagttgcctaaaatctgaggaaaagttaacaccagatgtggatggctgtggctggtaacttaagagatgtactgaggtagctaggagatgtttgaggtatatgtgttgtgtattcctatgttcaggctctgtggctggatgcagttttatttcattcatctagtgttaaatggcacataagaaaatgggattcatgtgttcatgttgtgccctagtgtaaccagcacattgaaacaaattgtagttttcaaaacaaacattatagtagaactgactgtatcagggcttttattccattccgagagcacaccactggaaggagctgtcagtcagcctggaggagtcttggatgcctttacagggaagatgatgagtgaactgagacttgccgaatgagtgtagtaatgtttttgctaggtatagtgtaagtagagggagggcattccaagcagagggaacagcagcttgtggaatagcatgcagaaggaagcctggtgtctccagaaaactcctatgtagtttgaacttggaaagaaaaagaaacactgttaatgaaacttagtggttaggcaggagccaaattcatcatggcccaatgtgccacttgaaagaatttacattttatccttcaaggggtagagaccactgaagaattttgaacagaaactatttcccagtgctgatttatgtaacactcctggagacagtatggaagatagtttgaagcaggcccagctgggctctgagaatctggaggtaaggaagaaccaatgtgtatctttaataggcttgacccctttgagaatattataaaagctatagatgctcactggcaactgtgtcctttctttgttcctagaaatcattatcactgtaatttcatctcttgatattaagggccagggccatgcgagttagtcttttatatggtgatgagttaggtgaatttataatcaactttcacaatagctggtttcactgttagctttattcttacaatgtttaaaaatcgtgtggtgaatcataattggagagattttaacatcttaatgtgtatccactggcaaataattacgtgggtcaaaggcctgtttacatactagattcctatttttgcccaaattatttttattttatttatttattttttgaggcagagtctcgttttattgctcagcctggagtgcagtggcgcgatctcagctcactgccatctccgcctcccgggttcaagtgatgctcctgtctcagcatcctgagtagctgggattacaggcgcatgccactatgcccagctaagttttatatttttagtagagatggggtttcaccatgttagccatcctggtcttgaactcctggcctcaggtgatccacccatctcagcctcccaaagtgttggtattataggcgtgagccaccatgcccagccagtcccagattattttataataaagaataactagttgggtgtggggcccatgcctgtaattccagcactttgggaaactgaagtggggggatcacatgagtccaggaggtcgaggctgcagtgatcctggattgcaccagcctaggtgacacagtgaaactgagaccctgtctcaaaaaaaaaaaagaaaaaaaaaaaaaaaggaataaccattgtaagggatgaataaataataagcaagtaaaattcaaggttaaaaaaagctataacattctttcaagcaaaagttacaaatagatacgaatgatttgaataacatctaaatgaagaaagccatgtatctcactctttaaaaaatcagtattttcccacagtgctccttagcaagtgttttggtgcctgttacagagtaaggtgctgagaaaactcataatctggttgaagatactaatgacacaccaagagtaattgaaagcaggaatatcaggttaaaacataaaaaccatgtcctacagttttctagttaataaactgtcccacactccatttaggatgtaatcagtatgcagtaactatttattaaaagactgaaatgtagtacttaacggagagttagaaagaaataatggaaacgttgtgggacttcttggaattttctgatctttgacactttggacagtataattaatggattatggattcacagaggccatataccctttcagtaatttgtctctgatacttctgtggagcaatagttggtgctgttttttattttcttaataggacactggtggttttttttaattagaaaactaaaatttacaaaaatattatacagtcattgcagaaaatgaatgccacttgtatgaataaaaattaaagctcttaataacctttaaaagcactgatttttctttataaccctttgagaggggtcagatcatcaaataccaagtttctggtactgttcagctatcacttactaacctatgacagccatttgtgaaaggaaacctgcatacaggtataggcatataataaaaaggaattttattattgatagatggttacagttatacaataattcattggccttagttcactttaataggcagatatttgaatccttacttaatctagccattaccgaagtatacatttatccatattcttctcccttaactctcagaatcataatcttttcttcatgtcatatttcttctagtcctcaatatttactaaaataataatgtacccttctcttacagaaataagattttttttttcctgaacccctgtcctcatcatacccaatccatactgctttgattgtcttccagctgagccatttggttcttctagcatatgcagagaaatgaagtcttagtcattgaataagaccacatccaggaataaaagcaccttttaaacatggcatggaagacgcttgagagtctctctcttccccacttttcaggttgctttgtcttttacttgacatcatccgccccatacatcagccatctgaatcattttccatcttttggagagccaggccctttccggagtccatgcctttgcggtatctgcctgaaattccattttccacttggcacatagctattcagtcattaaaacctagctcatgatcaccttttctgcgaagcctttcctgatcccctgcattagttaggattagttgggtacggtagcaagtaacagagacttcaaaataaggatggcctaaaaatgagaatttatttcctatcaaagttcagagtttgcagtgtagggctaaaatgacagctctgctccacgaagtaattttcagctcatggctttggaagctctcagatttgacccttgtccttatggttcaaaattgaggtgtctttgttttaagcagcagtatggaagaaaaaagagacaaagggcatacaccagctgtttctttaaaaagcttccctaaagcctcccacaccatgtatctggttgcatctcattggccagaacttagtccatggccacaaggaaggttatattattatggaagaaaagagaacaggtatggggacaattggcagtctgccacattactccaactagaggtagttgctttgcactttgtgttcccagagcactctaattatttcacatttaggctatattgtcatttgccttctctgcttgattctggacttatcagagactgtgtttttcatctttttatctctagcactttacataaagcttagcacatagtccatgttcatacttgttgaatgaatggataaagacatttgggaagagtacagcaaaaatatcagacataagcagatggcagtatttaaatacccatgtgtacaaagataattgcttatgtagacattgatgtcttttcttatacttaatttttttcctattttctccattatgtgaaaagaatagacacagtcaatagtagagggcatgcctcaaaattgaccacacagaacatagagttatttaaaaagtaatatgattctctgtgttatactttattattgtagtaaaatatacaaaacataaaatttgccattttaaccatttctctctctcccccattccccttcccttccctccccttctgtacctctctttccccctctctccctccctcttttgagacagtctctctctctggctcaggctgaagtgcggtggtgccatcatagctcactgcagcctcgactttctgggcccaattttgtcctcctgccttgacttcccaagtagctgggattgtaggtgtgtgccaccatgcccagctaatttttaactttttttgtaaaggtgaggcctcactatattacccaggctggccttgaactcctgggcccaagcgatcctcctgccttggcctcccaaagtgctgggatgacagatgtgagtcaccacacctggctcattttaaccatttttaagtgtatagttcagtggcattaagcacattcacattcttgtgcaaccatcatcaccatctatctgcagaactttttcatcttccccaactgagactctgtactcattaaaaactaacctcatttcctcctctccgcagcccctggaaactaccattctactgtctgtctctatgaatttattactctaggaacctcatgagaagaatcatcagtatttgcccttttatgactggtttattccacttagcacaatgtcttcaaggtacatccatgttgtagcatgtgttagaatatccttcctatttaaggctgaataatattccattacgtatgtagcacatttggtttgtccatgcatatgttgatggacgcttgggttgttgtgctacccctaaacacctattacccacaaacacaagccacatacaggttggtatcccttacctgaaatgcttgggaccagaagtgttttggatttcagatttttttttttttaatatttgcattatgtttactagttgggcatccctaatgtggaaattcgaaatgttccagtgaacatttcctttgagcattatgtaggcactcaaaaagtttcagagtttggaccattttgaatttcagatttttggatttagggatgctcaacctgtactcacatagcttcttgaaaggaaatttaagaaaagtacactcacctatattaagaacttatttttctagcaagtaatttatcacctctcccaatcttagcttctgaaatgtaaactaagaaagttatgaagaacattatccaggtgttaaatcttaaaagtagatccaagagtggaattagagaaatacagtggcctttcacaataaaagactagattttaagagtctcttaattatttggtgagagacacaggacagtacaatctgtgaatttctattcttttgaactatggagattttatcatgactggacaatgagaagaaatgttatagctgtagcttgatggttttgcttttataaaattcttctggtattgaagagaaaaagattattaatgggtaaagtaagaaaaattaactccattcctactgggtgacttttattatcagatagcaatctgataactgattattattagtttggtgacaataattatttttggatgcttggttgctaataatttgcctgatgcctagaaaattctgatttggggtctgtattctagtgggcatatagcccaaattagcaatcagattcttctactaaaattatctgatcaagctttcagataattcatgcatttacatagaatacatatcagtggtttaaacagaatttcacagacgctttcccattgaagctgattgtttggcaaaatggtgagtcatgctttactggccaactcacacaccagttgttgatataatcagttacctgagccaagatcaaagcagcagaatagaagatagtaccttggctctgatacctttctgtcctttctaaaaaaaaaaaaaattgggatgtaaatttccatccctctcctatgtgctttgggttttaagaagcaatataagaccattttttatctttagaatcttacagttgtagagataaaattgatatgcttgaaatgatctgaaaaggtgagaacaaattgtggtgttaactataaacccttttagagaaatcaacagggagacatttgaacttgatgtagatgttaaaattagaattgaatggtagagggccaactaagggaggtatttcagagtaaggagaaattagtttggataaagcagggcctgattatgggtggtaatgagtgaatgtgaggcgcaagatgctcaaactgttgaatgttcctaaaagaaacagaatctggcagtataatgagtccaggaagacaggagagagactaaggtgttgtagaaatctaggaatgagacaaaaatctggacaaagttactggcagtgaaagtagacagaaaaggtacactggagggacatcttgaaaaaagaaactgttgaactaggtaacattaaatatggtggtattaagtggaggaagagcaagatactctaagattttcccaagaaatcaagtacaatcctggtaaataacatttcaagtacaaacctggggagacatattgttaattttggatatagttaatttgaggtccgatggagaatagccagattgggacagacttttaggctgttagtggactgaagagtgtgtgttgaatgtgtggacccaagtgtgtttcccatacacatccagttgtatttgaggaggtgaaaattggtcctagagaatatttgtttataactgtaaaggtaggaacatatgttctcatagcttctatgtatgtgttaaaaaatctttaagtcaaataaaatttttttcccattagcatcatttcacttgaaggaactaggttggttaaatagatgaagttcatcaatcacatccaggaaactgaagttttttcccatacagtcaaataagagagctagtaagctgcattttgctagcagtaagtaagatgcagaaccaggataagaacgcagattctttaaggaacatcttggaataaacattgtggctgaataatgtcatatcaatgagcattatattcttaaatattgtaaattattgaactatttaacacgtttaatttttacaccatttgaagtaatgtaccagtagaaagtggatgcttcatgtttttctttggtagaatatttaattgggtcgactgtgccaaattttatttgtggctttctctctcagaatggctctttttgttaatagcaaaacatacataaccatatggagtcaaagagaaaaaaaacttggcagaagactatatccattgttattggattgtaaattgtcataagatgtaatatcttacaggaatgatagttcgaaaggtaatataattagagaaataatagtcttgtgtaggggtgaactattattggagtttcactgaaggatacctgaggtggttgttagtagcactttgcgagtgcctccaagtacaagtacagtactgctttctgctttctttgttgtctgtcttgcgtatgctgctttttggttattctccttttctgtagtaaaatgtaacccatatataaaagaataaatacattataaagatacagtttaatgagtaattataaagcatatttgctacccagattaagaaatagaatattgccagtgaaccagaagcctgctgtgtgccctttcccagtcatactccatctgtccccaccccatcgcatcccccagaagtaaccatattcttacttttgtgaacatcattttttctttctctttaaacttttaccatctatatatgcatccctaaatggtatagtttagttttgcctcttttgtacacatgtctacacacatatgtatacatgtcagtattcgtgtgtatatttttatttctctaatccattgtgcatatactattccattgtatcaatatactataagatatttattctgctctactttataatattgaaaaacgcagctgtgaccagtttaggaaataatgcccaggaggatctcctctctcagagaactaaggtattaacgtattcaaacggaagcctttatctgtagaatacttgttaatatcatgtggtatactagaattctagggaacatgagttatgaaatactggataagaccttttgttattacattttgtcactgagtaatttcagtgcctgctattcctacaatcatgtctaaggagaacattcactgagggagtaaactaaggtagctgtgctttcaatcgtgaatgaccttaccttacctggccataggtgattggactggcatgggtatccaaattaaagtcaccagtgattggtcggccactgcccaaccaggtggaagcacagaaagttgtctccacatgggaatgagcttaaccaatcaggttctgacaggccttacaattggctatatttggttaaagaaatacagcttttgcttttaattttctgtctggatgtactccagatagacaaggtggagtactggttactgtaaggatacacatgatgtgtatcataaaactcacaaaaagaaatagagattggcagttaagtattggaagcagaatttgaaaaatcaagagagagataggaggggcctgtgatagatcaagaattagcaaaaggtatgagaaagtggcacctgtgaggaagaagaagaatacagagtctagaagcagagataccagctggtggctggaggtaaatcacatatctaaagctgatacccagggagttgctgggtcccagtaagaaccagagttctagaatgaggatctgccactgcctactgctcctcttgctgcttcctagggaagctctggaaccagacccttctcagtcccagtatccttgaggcccagacccacttgtgtcactgattttgttcttggacttctgacctgttttccttatcaaatccgtgcttattaatcaggatccttcctcagccatacacacccacatttgagtatgtcagaaccttgcaaccagaagagactcataaatgagttgaaattcattagtgatattacttaccactaattcctaatactgtttgagaaagtcacgctggcttgagtggagacctgtatttgcgattcctttctccattgattgtgttctctgcccctgtaacccaccatttatttgtgtctcttcccttcctcaccgttgcttcatctttaaaaagtttttaaaatatttcattattcatttcttctgcattttgcatatatctttgagtttataatatgaaattagattgatctttttcaagatcgacttcctttttcttttatttatttgaaacggagtctcgctctaccactcaggctggagtgcagtggtgcgatctcagctcgctgcaacctccacctcccaggttcaagtgattcttttacctcaatgtccaagtagctgggattacaagcgtgcgccaccatgccgggctaatttttgtatttttacaaatcccaaagtgttgggattacaggcgtgagccactgcacctggccccaagatctacttcctttttaaataacattttaaaaatattgaatctaatattttggaaagtacaacaaagaaaaaaaatgaaattacaataaatagaaactatccagagataaccacagtgatatttcctaactatattttttaaaaaatgtttgtgatatagatgtgtgttgaggtctgtttagttgtactattttataaccatttttatttaatatcatgaacattaccagaatattaaatgccccagaaacatggttttttatgtctattatttcagcatgtaaaggcaccagaatttatttaaccattcttctattcactgagcaatatgattattgccaattttttcctaatataactaatgctatgatgaatatttcctgcatataaatctccatccttatctgattatgttcttggaataaatttctaattgggaagccttagatagaaagatgtgcatagttttcaagctttagtacataatatacaatttcctttctgaaacgtcatgtggatctatgttctcacattagtgtgtgacaatgctactttctcaatacccatgctagatagtaccattaaaatgtaaaagaaataaaaacaaactttgacaggttgataagtgataaatttgtatcacattttaatttggatgtctttgacaaattccaagaatgacctttattggccaagtatacatctgatttgtgattattctagagatatcctttgctgttttttaattgagttgttgtgttttaccattttctttgtcttcttttcttttttaaatagagacaggtcttgctttgttgcctaggctggactttgaggtcctgggctcaagcaagcatcctctccatacccccacccccacccccaccttcttagtagctggtctgtagacgcacaccactgtgtctggcatatctttttcttataaaatatatatattaattttcaacatatgacaacattgtcatgtatcatgtcgtttccatatgtcatatgttgaaaatgttttattcagcttatcatttacctttgtttatgacattttttgatatacagaaatcttaaattttatgtcatttagtcttttgatcattgccttttggtttattgcttcagcattttgcttaagtacaccttcccatcttttatttgagaagtcataagtttttttatgtttactacttctttttttttgagacagagtctcgctctgtcacccaggctggagtgcaatggcgcgatctcggctcactgcatcctctgcctcccaggtttaagcgatccttctgcctcagcctcccgagtagctcacattacaggcacataccactatacctggctaatttttgtatttttagtagagacggggtttcaccatgatggccaggctagtctagaactcctgaccttgtgacctgcccaccttggcctcccaaagtgctgggattacaggcatgaggttccacgcctggcctgtttactacttttttaatggaaggtttatgtttttacaatccgatgaaattcttacccattcatcttatgggaacatttgagattactcaattttaggccccaaagtatagttttttagtttcagaaaacttgactgttaactttttatgagtttttcatctacttcctccctccttccactgcatatatgtattatattcaacatgttacaggaaaggggtcccgatccagacccccaagagaaagttcttgagtcttgcgcaagaaagaattcagggtgagtccatagagtaaagtgaaagcaagtttattaataagttaaaggaataaaagaatggctcttccatagagcggccccgtgggctgctggttgcccatttttatggttatttcttaatgatatgctaaacaaggggtggattattcatgcctccctttttagaccatatggggtaacttcctgacattgccatggcatttgtaacctgtcatggcactggtgggagtgtaacagtgaggatgaccagagatcactcttgtggccttcttggttttggtgggttttggttggcttctgtcatgcagcctgttttctcagcaaggtcattatgacctgtattttgtgctgacctcctatctcatcctgtgacttagaatgccttaaccatttaggaatacagcccagtaggtctcagcctcattttacccaacccctactcagtatggttcacatgcctctggcaaacatatgtatacttgaacatttagtataatgataattgattaagcgtcatacaagggactggggggcatctccaaatatgtctgaaatttaaacaaaggccttccatttgtattttctgttggtaataggaaaaaaggagacacacaatgagttatatttttctcattttctacataaaggaagcatatcagttttttaaagagaaaccttggcagtaaagtcaaagaagaatttttttgtgtgggtctttatatcagggatgatgtcttttatactattttctttcttttttttttgagaaggcatctcactctgtccaccaggctagagtgcagtggcgcaatctcagctcactgcaacctccccctcctgggttcaagcgattctcctccctcagcctccctagtagctgggattacaggcatgtaccaccacacctggctaatttttgtattttcagtagagatggggtttcaccgtgttggtcaggcagattgtgaactcttgacctcaagtgatccgcctgcctcggcctcccaaagttctgggattacaggcatgagccaccacacccagccctttgataccatttttatagaacgtggaataatataagaccacttatttgataaactcttaagaagttgagagcataacattaagttgtaattctggtaaagtatttgtgtagggagccaaaataatacaaaccacatatatatctttgtggtgaagtaatttgattacagttagaacatagaaaatcagtgtgggtggtgagatatttccaaactagttctttcaaaataataaagactttttttttttttcttgagatggagttttgctcttgttgcccaagctggagtgcaatggcactatcttggctcactgcaacctctgcctcccaggttcaagtgattctcctgcctcagcctcctgagtagctgggattacaggcgcatgcccccatgcccgctaattttttgtatttttagtagaaacggggttttaccatgttagccaggctggtttcaaactcctgacctccggtgatccgcccacctcagcctcccaaagtgcagggctcacatgcgtgagccaccgcgcccggctgtaatcgagatttttgacccaattttattttatgtctatttgtggtttctatttagtgcttgggaaatagttgtggaatggttcatccatactagatctaagtattgcccctggaaagttttatattttattgtgaaaattagaaaatctgtataacaagatgtagaattatcccatttaagtggatttccaggattgacctgcaagcaataacaaaggatttttacccactatgcttcaaacaattatgatgcaaactgtttaatagtaagtcttaattcatttcagatttcagagaatgtcttaagaattttggggatattaatgtagcactacatccttatcaaagaatattgagaattctgctttaaactaccagttcatctttgagactgtttaaacctgcttttctttatctgcaaaagaagtctcaattttaagccatgtttatgggaaatgactataccttaaactgtgtagaagttcttttagggggagacaggaaagggaaagtttgtgttggaagaatagcatttctttgattacatatttttgtagctgacactacatttacattgtttaaattgaacataaaattgtacctgatcaaaaacatgtctagctatggagtatgagactatttaaataactcagtattatacattaggatttttcttttatttaattggagaggagtatgatcagaattagttgtaactgttgtgctatgttagaccttaaataactggattccatttgtggaatgctgtgcttattttaaaaattctaatattaaaagaaaaatcacagatctttgaggttagctaattgagttgcttgtagaggaaggactacctgggctggctagagacagagggttgtttatcctctttaacatttcccatgaaagactctgcacaaatctctttcgattgtttatttacctttttaaccatttgaaatttaattttttcctgagagtttctttgtcttggtctttagaaggattgaagagcggccagtcagaattcccatttttaaagaaagggtctctgtatatgtaaaaacaaacatttgatcaccttcattctccagatggcataattccaactatattatctcaatattcctaaattataataccgttaactgttgttttgctgtactttttcttcccagtttttaaagggtggaggaggtagccagacacggagccctttgagttttttttttttctctgatgcttgaaatcctgggatcaatattatgaaggatgctccagaagggagtgagggtggagaaaggtagactgtttaggcatctgattcatccatgcaaatgatgaagactgaacctgttagggggcagtggagatggagaagagggataggcccaatatggttgtgaagtaggctatagactcacattcttattattcaccactccccagagtaagtacaaaggcagtggtaactctagaatatctagcatgttttctctcctgccatttgaatcttctcctttggagtatagaaatattccatcagggccgggtggctcacgcctgtaatcccagcactttgggaggccgaggtgggtggattacaaggtcaggagattgagaccatcctggctaacacggtgaaaacccgtctctagtaaaaatacaaaaaattagccaggcgtggtggcggacatctgtagtcccagctactcgggaggctgaggcaggagaatggtgtgaacctgagaggtagaggttgcagtgagccgagattgcaccactgcactccagcctgggcgacagagactccatctcaaaaaaaaaaaaagatcccatcagcctgtctcctttaaggttatatatttttgttacatctcttttaattttggtttctacatgtttgttgttagtacggtatatagttatgtaattgatctttgtgtgttgatcttgtatcctgtgaccctgctaaactcacttagtttacttttctttcttttttaagattccttagggtttgctatgtagacaatcacatcatcagaaaatggagttttattttctcttttccaatttgcatgactttatttctttttttttttttttttttttgccttattgagctggctgttgcatctcttttgatctcttgttctggccatcagtgattacatatcaaggttgctagacagatttgtttcttctgcctagaacagtttgcatgggctggtgttttccttgagcaaagattttaattactgattcaaagtctttaacggctactgatttttaatttcttcttgagtcagttttggtaatttatgtttttctaaaaatctagtcatttcttcttagtttttaaatttatttgcttacagttgttcatagtggtctcttacttttttttgagacaggattttgctctgttggtcaggctggagtgtgatagtgcagtcacagctcactgcagcctttacctcctgggctcaagtgatcctcccacctcagcctccagagtaactggaaccacaggcgcacaccaccatacctggctaacttttgtatatagaggcagggttttgccttgttgcccaggctggtctcaaactcctgggctcaagcagtctgtctgccttggcctcccaaagtgctgagattacaggcatgagccactatgcccggctagtctcttttaaatctgttttatatctccatgtgttcccttttttatgtcttgcataatgtgtccatgtagtctgtggccctgggctgttacactttttaaggtttctttgttcttctcttcctgtggtcattgtacttacacgtagtactcctctataaccacatccccaacccttctaatttgcagtttctaagctgctatgcccttggtgtctagcaaataaagtttgcttaaattgaaggtcaatttagagtaaataggcatagagaaagagctttaaatatttacatctgagagcttgaactttatcgtcatattgtccacatgtggtactcagcaaatgttaaaatgaatatttaaaaaatcttttcagattctgagcttttgataggttaggtttaattttagttgttaataaactaaagatttcttgattgtcctatttctaaaaactaaatttgtatgttacatgctaattggtaaaaccaaaactaagctgtattacttggagtttctagttgatgattttgttcaacatgcttctctacatttgttttcttacgtgattaaaagttatccttatttgcctttacttctcccgatacccttctcaaatatcctgctaaagactaattttaagatgtttccattgtcttttctcttttctttttcttttttttttttttttgacacagtctcactctgtcacccaggctggagtgcagtggtacgaacttggctcactgcagcctcagcctcccaggttccagcaatcctcccacctcagcctcatgagtcgctgggaccacagatgcatgccacttggcctggctaattttagaaaatcttattgtagagacagggtctgtctgttgctcaggctggtctcaaactcctgggctcaagcgatcctcctgcctcagcctccaaaagtgttgggattataagcatgagccactgtgtctggacaaattttcctttttcttatggtgtcagggagggtagatccaaaaaggggcacgcattgtcctgatcagtttctttctttgtttctttcttggattcattacaagttgtcaaattattttccattagttttttttagagctaaaatttggcataggagacagtagtatcttttaagtttgttaaagattagtaaatgtattctaagcagttttagataaaaagtaaaaaagttgttattatcaaaacattattttatttattttagtccttagagtcttcatatttcttgtgatacttgatctaaactgctggggttataaagtggttatcctccctagagaaggaaatggtgcagattccatttgctcacttaccattggtaactgaatattatttgtaaattattagcagaatcataatgagctcactgttaagtagttcccctaatcagagactcttttctggattaagctgtctgctaaattcctcaactgagagttgttttactttgttggtatttttgtttatatttaaccaccttttatattaagggagatttgtgggaagcattgatgccctgtgctctagtaagcatgatcagtagaggcagtgctgacagtactagtcacatgtggttataatgctgagtaaaatgttatttactttactaagttggtttgcctaacggaagtagtctccctggagatgggatatcaatgcagaactgactcagcaataatctctccctagtcataaaacagccttactttttgttactgtcactaacatgaactaacatgctttggattggttgtatatcagaagctatgatttttgtcgccctattatatacttagttgtttttaccttatgtcatgttatcctggaaaggccgagacttaggtctctaacacagctagtgggagcttgaatttgattttaggtcctgctaaatctaaggcttatgttgtttgtgttataccacagtctgccaataatgctggccaaataagaaacattttgatgaatggtgtatttgttagtatattacataagatattttccccataagaaaatgaagcataacctcttaggattttaggcttctctagtgtacagtatctatagagcaaaatttaaattgtggtagtgttttatagactaaaaaagaatcagaagcccctccaaatgaataaggactgtgttcccggaccttacccagtactgtacagattagctatccttagtttttgtagatgagctgtagagtcaatggcttaggaacattgaaatgtccatagtgtttcttaggatataatatggaagttggagtcatggatagaactttcactctggcagatactgtacataggaaagtgacatttgtggcatgacccagaagaactgaaagaaagaagtattttttaaaagagagaaaagctaaagatgctagataatactggtaacatttttaaaacctctctgtcttttgaatatctcctatgagccattttatgtatattatttctatcatcacatccaacccataaggtagatattatcgtcattgtaccaaggggctaatttaggttcagaaatatgaagaaagacattcaaggttatagcattcttaaatggtaatgctggaattcatcctttctgctcctgcctcccaaatgtttgattgttttattgcctatccgcttttcattctggtgccctaagcaaagcataggcagtatctgtacgtgagatttgggcttaagaataagatttctgctaggctcggcgtgccctcctacgtgataccagaagttagaattgtgtggataaaacttaggaactggaaatgtaaaattaaatacttactttttttttaattagaaaaagaaatagccctaaaattgtcttttttggagagtaggattgcagggactgtatcacacatgactcttaatttggttctgtgtcttcttttttcttctttttaaaaatggaccactatattaatgtacagagaaaaatacaagaacttattaaactccatcccttgaaattaggcatctgattacaaaatacattcttaactgaccatataattaaaagtagtattcagagaagcagtagaacttactaatatagaaccatttgttacaataataccagaacatttctgagcggtatacaggcctacacaagggtcatgggtttaatagttgataggcatttaaagtacagataccgaaacattgttggtaggcccatgaatatacttgagattcttttggtcagagtattgtttcattacaattaaaatagaataggctagaaattttcttttgagtatgcatgtgctacctctgtcaacttttcatgttggagtgatgctgagtttgtataataatttgagatatattccatctttttatgctctccaataattcaaaatatggatatgatgtattctctgaagttttaaagaacttaatgacactattgtacttggacttagaataattaatatactgttctaaaattgactcaaaaagaggtagagaagctgaatagaccaaataataatagaagaaattgaagtccaagttgttattaatctctcagatatatcggtttctacatctataaaattaagataattattactcgtagggttgttgggagaagtaaaatgcttatgtcagagcctggtacattgttagcccccaataatgtaaattgtcatcacagccattactgtcaagattattactcttttttcaagattcagcttttttccagagttttatttctttgattactcacttcaaagaatcttagatttactgttaaaaaatgtaattgccagaggtttttctcttttgctagtctgattccatctctgacatagtttacttaaaaaaaaatacactttataagaaataaaaaggaatgtagacacagacatgcaagtgtttttttttattataagagaagattatgtacaggttttgcataaaagagaacatgtggaaagatactcaccagaatattaacagtgattatctctaggtggtgggacttcaagtgagggttagattttttaaaatatttctggagtattttaattattctgtgtgtatattatttttctaagaaagttttctattttataacttcatgctctagtgatcatccatttacttaatgcacttaagatgataatcttagagtattgatcttcaaactgttccatagaatgactgttagatttggtaaacataatcttaaatgttttatgtagtacatcaggggttggcaaactatggcgtatgggcaaaatctggcccaccactggttgttgtatagcccaccatgaactaagaatggattttatgtttttaaatggttaatgaaaatcagaagaataatattttgtgacaagggaaaattatatgaaatttaagtatcactgaccataaataaggttatattggcatgcagctatgcttatttacttgcatgttgcctatggctgcattcaggctacagtggcagagttcagtagttgccatagagactgtacggcccacaaaacctaaaacatttactgcctggccttttggagaaaatgtttgctgaaccctgtaccacattagagaaacctatttagttcagtgttttgttcttttttttttttttcggcgagtattaccacctgagctctacctcctgtctagtcagcggcagcattagatgctcataggattcagccctgttgtgaactgcgcacaggggatctaggttgcgtgttccttatgagactcttaactaatgcctgatgatataaggtggaacagtttcatcctaaaaccttccatgaaaccagtccctggtgccaaaaaggttggggactgctgttttagaagtctctgagtgcctcttctaattctctacccttccccataataggcaaccattatcctaactttgctgacatccccttgcttttgtatctttattatatatgtatgtatacctaaacaatatatttgggggtttgcttgtttaaaaggtaaattgtttcataatggatatattcatctcttataatttctttctctaagcattatgttttgagtgttacattttatattgatacaagtagctatagttgatcatttctgctatatagtgctccactgtatgaatgtatactaatggactaattatcatttacttacatatctccatgacagccacaacagcaacattttaaaaattcaatttgttgactgtcttcaaacccctacctgacaaaactgttttatttcgtgttttctctctgaaacagcatctctattcatgcatttgcctaagcaagactcctagtgtcattttcaataccactctctcctcatttcccattttcaattgatcttcaatcctatagatttgacatctgaacatctcatagccatctctcctatcaccatcctagtcaggtgcttgcttggactcctgcagtagtcttcagtgccatatcagcatccacccttgctctcttatcatggattatgaggcttacctctccaacttcatcttgacacacttcccttcactcactgggttgtgttaacttcagccattgttcatgtcatgctcatttctgcttcaggacttttgcaaatgctgttccctctgcctatagtacattgtcctgattcatttcttcttatccttcaggataaaattttgaaacatcacctcctcagaaaagtcttccttgctccccaaccccgaaactaggtcacgtttccctgttatctttaggactttgttacttgctactcaatcctggtactactacaaattttaattatgattgttaaggaaggcttatctgattcagtcagaaccagttgtctgtaaagtctaataaagcaatacatcatagaagggatacataccttaagtagtttattctaattttaagaatataactatgttcatttgccagtcttttgattaagaagctgttatcagaaaggggttcgatccagaccccaagagagggttcttggaccttgcgcaacaaagaattcagggtgagtcaatacagaaaagagaaagcaagtttattaagaaagcacaggaataaaataatggttactccataggcagagcagcagcatggactgcttgactgagtatacttatggtatttcttgattatatgctaaacaaggggtgggttattcatgagttttccgggaaaggggtgggcaattcctggaactgaaggttcctccccttttcagaccatgtaaggtaacttcctgacattgctgtggcatttataagctgtcatggtgctggtgggagtgtcttttaacatcctaatgcattataattaatgtataatgagcagtgaggacgaccagaggtcacttcggttgtcatctggttttggtgggttttaactggcttctttaacacaatctgtgttttatcaagggtctttgtgacctgtatcttgtgccaacctcctgtctcatcctgtgacttagaatgcctaaccccctaggaatgcagcccagtaggtctcagccttatttttcccagcccctattcaagatggggttgctctggttcaaacacctctgaaagagccaaggccttttctttcagagtaggtctactagttatagatccatattgtctgtattggggaagccatgcccataatgtatcatgtaagattccagtttgggttttttaagtagaacaagaatttaggctcttcagatgaattcttagcttaaaatccttatagatctttacaatattttttccatttctttgaactattttcttggcctctacctaattcagcagcagaagtatttcacttttattgagtatttcagagtcattcaactttataaaactccccactcttccatacttcattaggttagttgacatttaattaaatcacatagttacactaatataaatggcatgaacaggtttggaacctaacataactaaaagtgtaactcactgctgggaactggaagtgtctgggtatactagattagaggactgcacctctttttgagtgtacatggtctactgtattaatatatcatgtacactgtaatagtgtaactctaaggttgaattatatgtttattttttacccacaaaatagcaattttatatggttcaacctaatattaaataacagtataaaggataaatggccatccaattagataataatagatcctgtcacaatatgacgtgtaaataacaattaaaaataaatcatttttaaaaggccagaggattcttagattattttaagaagctgtagttatgacagccacacattcctgaaattctgggtcagttttactgtcaaacgtattatctttttctaaaaattattgaaatgccaccaaaatatcaatcaaaacttgtctcctaaactgcctcttgtgcctgaatttgatacagaaatacttttaatcagtctacctgtcccaatttttgttactgtaactgaaggactttctattggaaaggtgttacagctgagaagtctagatagactgaagaagaggaaggatttgagttgtcacattcttcgtctttatggcattcagcattaagaatataactgttatgttataactgtatattttaacaatataacataattaggtaagtataatagttctctctcaatgtattcttaaaacatgttaaacttaatttatttctcataaagcatgggttaagtcccattgaaataaactcctgggaattatttcaattattttgttttgtgtaaattttgtaatagatactagttggcattaagaaggaccattgactgtactatttcatttttatatatgtaaacttatgtagtgatagaatttgacctaattttccataattctaatttgtagcttatccagttaaatataatttttcaacaaaagctatttaacttccaaaagcattataaaatcagttttaaattattattccttcgaggaaagaataactttttagaaatttgctttggatagttttaagaacagctaagcatgtgtagaaatgtaagagattgtaatggatgataaacttttattctagaatcaatgcaattgaaatttaacgctttttttagccctgtataatttcatataaaaccataaagtagtagagttgtaatttagatctcaaagggtttcagctctatcttaaaaacatttctaaaaatttaacaaaacaaacaaaagaacttcgaatctgacattgttaataccaagatagttgaaatgccttcctgattgttatgtcgactagtctgtgaattactgtccgtattttttccttcctaatattaaagctgcccacatcacatttcacatgtcaagaaaaatcaactatctttctccatggagtaagatgcagtctgataacatgctccagaataagaatagagaaataactaaatttcatgctctgtgaaactgaaccagggggttcagtgttagaaactgcattttgtgccctggcaagtacaaatgttttctgcatatcacactaattcatacaacttataaagaactatataaggagatgagtggttttaggttaggtcactttttaaaagttattttttgggtataatttgcatgtcagagaagtatctttagatagctacaaaatttataaacacggagaagagagttaaattcttggacttcttgaatatggctcttctagtgtctagagtgatgtggtttatcttaaataggtggattagggtcagtaaactttttctgaaaggggctagatagaaaatattttaggctttgcagactacatgtggtctctgtcagatgttcttcgtgtgtgtatgtttaaatgtaaaaatttttctgagctgggatcccttcaaaaaacaggccacaggccagatttggccttcaggctttggtttgctggcccttgctctacatcagtaatgttcaatacaaatataacctgaatcacatatgttacttttaaattttctagtagccacatggtgggtggtgctgttttttgttaagagtcttgtagtgacatttgaccttgaaactacaaatatatgaattaggtaaaaataaaaactaattttaaaataaatgagaagaaactaggctagaaaggggctaggatattggaagagaacatctacaaagataatggagtcaccaagaatacggcaggaattcgactgtattaacaggactatgggcaaggaacggaaatcttaatttaagaagaagaataaatgataacaaggcacgtgaagttcaaatggcgtaaacctcataaaaaatgcttacgagagagatttttgcaagacagaggaggccgtgttctaaaatagactttactgagatttaacagttctgtctaatacattttattctaatatataccaactactgtacaaacttcctatgtgcctgacagtgtgcttttaataaagaattaaatcatctgaaagtacattttataatatcatggacattaattttctgtgttgtgtttccattagtccaagagccttttctgtgagaaactaatgggaagacctataattcattctaagaaagtttattctctgttattctcttattcctagttaacttcttgaaaatataagcgtttatgacaaaaataattagttgaagttatggcaagatcagctaaagttttctgctatcataatgtgacaaaaccaattgaattttaagtttaggtttttccatttcttctaatgttgacttttagctactgaactagacagtgtgcctgttgatactgtagtcttaaaagaatttatttgtaaagtatcatacactgctttagatttttttttaaggaacaagaataaagatgccaaattgtatgtttttggtttttgtttttgcgagtactacagtatcatagcctttctctattactttattacagtttcccaactcttccaggattaaagaattgggaagtttaaagacacctttcctggccgggcatggtggctcacacctgtaatcccagcactttgggaggccgaggccagtggatcacctgaggtcaggagtttgaaaccaacctgaccaacatggtgaaaccccgtctctactaaaaatacaaaaattagccgggcgtggtggtacacgcctgtaatcccagctactcagaggctgaggcaggaggatcatttgaacctgggatgtggaggttgcagtgagccaagatctcaccattgcactccagcatgaacaacagagcgagactccgtctcaaaaaaaaagaaaaaggaaaaaagacacctttcctaaatattacattctttttctttcttttctactcaaactgcttcttcaaaatcatggataaatttgatacattatagggtgggagggaagatatgggttttttataagtgatgaacacactgtaaaccttagaattgcaaggaaccagttaagtaaaattgggaagattgctactaatgaaaggtttttgaactaattttaatgtgttacacaaatgttctagttacaacttttgaaaagttgaatacaaatgtgtttcaacaatatggaacatattttgcctttgtaatattcaaattaaggaaacaggttgaagcacgggaaaaagaaaccagagtttaagagcgtttattttctttcacctgagttcagaatattctgcctgaaaggacttgggaagtaatgactggcttgaacaaggtcagtgcctaaaaggcccggtggccttcctgctgcccaacagaacacacggcctcatcacttcagcagggcagcgtaggtgaacgcttggccagtatcactgaaattctggacgggaaggggtgtgggcactgccttagctaccttcacatgctactttgattaatttatttttctctttttgctgttttgtctttagattttataatcaatggataaagtgggaaaaatgtggaataacttcaaatacaggtgtcagaatctcttcggtcatgagggaggaagccgtagtgaaaatgtggacatgaactccaacagatgtttgtctgtcaaagagaaaaacatcagcataggagactcaactcctcagcaacaaagcagtcccttaagagaaaatattgccttacaactgggattaagcccttcgaagaattcttcaaggagaaatcaaaattgtgccacagaaatccctcaaattgttgaaataagcatcgaaaaggataatgattcttgtgttaccccaggaacaagacttgcacgaagagattcctactctcgacatgctccatggggtgggaagaaaaaacattcctgttctacaaagacccagagttcattggatgctgataaaaagtttggtagaactcgaagtggacttcaaaggagagagaggcgctacggcgtaagttctgtacacgacatggacagtgtttccagcagaactgtaggaagtcgctctctaagacagaggttgcaggatactgtgggcttgtgttttcccatgagaacttacagcaagcagtcaaagcctctcttttccaataaaagaaaaatccatctctctgaattaatgcttgagaaatgcccttttcctgctggctcagatttagcccaaaaatggcatttgattaaacagcatacagctcctgtgagcccacattcaacattttttgatacatttgatccatctttggtttctacagaagatgaagaagataggcttagagagagaaggcggcttagtattgaagaaggggttgatccccctcccaatgcacaaatacatacatttgaagctactgcacaggttaatccattatataaactgggaccaaaattagctcctggaatgactgaaataagtggggacagttctgcaattccacaagctaattgtgactcggaagaggatacaaccaccctgtgtttgcagtcacggaggcagaagcagcgtcagatatctggagacagccatacccatgttagcagacagggagcttggaaagtccacacacagattgattacatacactgcctcgtgcctgatttgcttcaaattacagggaatccctgttactggggagtgatggaccgttatgaagcagaagcccttctcgaagggaaacctgaaggcacgtttttgctcagggactctgcgcaagaggactacctcttctctgtgagcttccgccgctacaacagatccctgcatgcccgaattgagcagtggaatcacaactttagtttcgacgcccatgacccgtgtgtatttcactcctccactgtaacgggacttttagaacattataaagatcccagttcgtgcatgttttttgaaccattgcttactatatcactaaataggactttcccttttagcctgcagtatatctgtcgcgcggtaatctgcaggtgcactacgtatgatggaattgatgggctccctctaccctcaatgttacaggattttttaaaagagtatcattataaacaaaaagttagagttcgctggttggaacgagaaccagtcaaggcaaagtaaactctccggtccccaaaggttgttaactaggtccgctttcatgtgcatcagacagtacacctatagcaagcacacgtagcagtgttaggctttttcatacagtatgtaagcttagtgttagtatctgtcagatgctacctgctgttacttattcagataaacatggtgcctattggaacaatagcggatagagctacaggtgttcagtaagactacaaaaacattttgcctatttcgctaacagtttggtttttaatggctgtggtatttgagtgaggcaactctggggcatttgttatgaagaattctatttcttactgaagaacaaattattaatattggatgagtatttcaacagtgtgactaatgtttgaaattattttttctaagagtttttctataaccttccaaaagtcgtgatgtttgtagttactataaatcaagctttggaagtccaaaaagaataaaagactgccttccttttagaaaaaaatgcaattttctggccacaagggcatagtgcagttcacttacgtgttgatgtagtttataatcagacgccttttctcttctgcaaaaggtactgttaagtaaaccagattttctaaataggcattcttaaaatttcagacttacaaagctagtagtagaattttattgaaaggcctaggtattaattttttaaatgagtgctttaacttaaaacaggcgtttggaatagctgctgcaatgtagtcttgtgtgtgatttttttttaagttgatgtgcagtctaattgttgtttcataaaagttggatctgttcctatgcccaggatgattttgtgaaccgtgaagtacgtgagactagaagacgcccaaacaagtcagataatagtaactacaatggttgctgatgttgagattattgttgaactataattaataatttggatggcagaatttatctcttttttgtaaactctcataactgaattgcttaagtataatttatagaatttcagtgcagttcattcttaatggaaaatctgaaacctaaattgcagatttaaaaggtactgtacaaccattatatctgtaaataacttagcacctttttgtcacttagaataatatgtactactacttgagtgagcgcttttggaagttatatcaagttctagtgtttgcttcttagtaactgaactgaatttacagttctgtcctagacattttgcactaaagtagccgaatccactctcatgtcttttcgttaatgtgctctgtaccactggtgagtgctccatagtttccttacctgctgctacagaatgttattttacatccctatggctattgccaaggctacaaaaaaggaaagctatatttgtatgcaacactaaccttttgactgctaatgtatgtttctgcttgctgtgccttgttatggctgctttttttgtgctaataaagtatgtttggtgttctccttgtatatctgctgttttatacatttgcaacaatttctcttgtaaatggaatggtttggggtttttaaataagcattaactaacaacctttctatagttaatgcagagttaatgaacagtctaatattgacttatcagaataagctaactctaaatttaatgctctacatcttatcagtcataattatatatactgtggaacagtatctgtagttactgcaaattactgtacagtttaggttataacagaaaactgacagagaagtaataaacctattgatttctctgcttataaatgaaagattgaaactatccaatgacatattatagtaaatgagtatctgtaacctcccactgcatcagaagcaggttaaatgaagtcttgtgaatttgtaatagatcagtaccatttattggtttggggaccatcttaattaaaaataaatgcccaaaatgtagaactttaaccaaagacttgtcccttttaaagcaaaatggggattgaagggacttataatttctgttgtttctaattaaagtccctgaagatcatataccaaagtgtttgagaacttcatccaaacctactttaaagcattatgtgcaattaagttgttatgacataattatattgcctaattgttgggtcttttttcttgagcttataatgtacctggaaaataaacctcttgagaaaaagaaaagttcatactgattattggaaaaggactatatatgtgagcaagattgtgttttagagaggaaacttgaaactccaagaaagcacttgatgtttttatatgcttgtagcaaattgatgttctaactgtagttttatagaaagtattaatgcttttatgtatttcaaaactttcatatgttaaatggaaattgttttaaatgtgtttgagtttatgtaagcatgtatacactgtgctaaaagtcacatgtttcagtttgtgtataatattaatatgcaatttttggtttaaatttttgtcttaaaatattagtggcttacattttaaaaaagaaaaatcaccagcatgaacttgcacctaagtctatattcactgtgtccttttctgaatcccattgtagcctgtcaactaaatttgagtgttaacggtctttttaaagtgcatttaaatacaaaccaggaatttctttagaagttgagatacatctttatagttgaaataattaacccaagaaaaggttgctttgatttgtacccattctcattcattttcttcattcccttacacacacacacacacctctcccttccgcatacatataagtgtgtattatatatttatgtatgcacatatatacatttatgttgttaatattactttagatggcatttccacctgatacaaaaacatttagagatcttattctatagatattacctaaagagtattcttgtactattcgaattttattatctgcactaaaagtttagccttgctactttagccttgtttataatacagtcaccttacaaagagaaagagttcatctgtattttgttttctggctaaacacagtacaaaatatttgaagaaaaacagcttggattaaatagttactaagagttataattaaatttatgtttcttagacaaaacttgagcccaaataatcattctccacacaccaggctgtttttagctcttatgtttacgtaagatttataatggctagaaccgtaagaactgatacttgaattttaagcttcatttgacaaaatcgaaagcttaagaatttttttatttcacattttgatctggttgctatttatgtttatttcaaagcttgcttttctctctggcactgaacactaatttggtgagttttattgagactggtcttagatctcttatttttatagcaaatactgctttttggtagagccaaagagcctgtgagtgaatcaggaccctcctttttttttgtttttttttttgttttgttttgtttttgcgacaagagtctcactcttgtcacccaggctggagtgcagtggcccgatcttggcttactgcaacctctgcctcccaggttcaagtgattctcctgcctcagcctcctgagtagctgggattacaggcgcccaccaccacgcccggctaatttttgtatttttagtagtgacggggtttcaccatgtcagccaggctggtctcgaactcctgaccgcaggtgatccacccacagcctcccaaagtgctaggattacaggcatgagccaccgcgcctggccataggaccctcctaagaaggatgcagagccaggtctgtctttgagagtgttaacatagagcaaatagcaccagtttgtttgcttacctgtaccccagcacatacagttttactttgatgaaattagatagaaatgcatagcaagggctgactcaagggtgagaaagtttcgaaagagggcaatgctgcttggcccgtgtgcatacaagctacatatttttgaggctctggttttgttttataattttgcaacagctgatccagaacataggcttttaaaatagtatattctaaagaggtttggggtggaatttttgtgggaggtagctggttatttgtgggggacgggaggagaggttgctattgcaaagtatagatgagttggagcaactgttttgttttcatgccctggacgcttgattgaacattgagactctcttcagccatgcagtcaacaaatatttattgaagacccgtgtgccactcactattttcagtaatgggtgtacattggggtataagacaaagctttactgccttccagagtttattgaattctagtagataagacagcaatgaaatggtaatttccgaagctatgagtaaaatgaggcagaacatggtggtggagggactggggcacaattttatagggtcgtaaccttgaatgatataagaaaattagaccaagaccaaagaacaaacgttcgagatgaagagaacaataaaactagtccccaaagcacatatggaattactcgctgagaaagaaagaatgccagtaaggtaagtccattgagtgtggagaatagtaggtgatgaggttttagagattggcaagggcctgaccatttagggctataagcctatagtgagggatttaagatgttgttttgagtgtgatgggaagccattggagagttttaagcaaaggagatgtgtggtgtgttgtaaatttctctggtcagtggagaaaaggctagtggaacaaggtaaggaagacttttacagtcatccaggtgagagatggtgggaccttggactagggtgatagtcatggggagaagtcagaattggggtatgttttagtggtaaagctgataagacttggcgatggattagatgtgaacaagaagaaaaagatcaaaagatgactccagtttttggtgtgagaagggtgattgagttttgagattcctattaataattctaacagagacattgcatagtaggcagttggatatatgagtgtagtgttaaggggagaaaattaaaatgtggaatcactaggccaggcatggtggctcacacctgtaaccccagcacttttgggaggccaaggcagaagaatcacttgagccccggattttgagaccagctggggcaatgtagcaagaccccatctctacaaaataaaaattagctgggtgggttggcatgcgcctgtagtctcagctacttgagaggctgaggcaggaggatcacttgagacagagccagttccttcctctaaaaaaatactaaaaatgaaatggggagtcactgtattgatagtatttgaagccacagaacagtatgcaacagctagggattttgcatgggattaagaatttctttggaggaaataattacgacaacatttctcttagtttgtcagttcaagattctgtatcattagttgtttttaaaagccatctgctttcgatagaggacttgtcttccaaaaacttttaagatactggaatcaaaccttgcgctgaatcttcatactacccacatcaaatttggttgtcatgctttccatgtcaaatttgcttgtgtatcttttttagtttgagtttttatatgataaatcaaagttcattatggaatattcaagaagtactaaagattataaaagaacctacgaaaaaatgttcatactgttgactgaatatttagactctgaccattcattccacaaatattaatttgaagacccatgtgccagtcacagttttaggtaatgggtatatattgaggtacattactaccaccaacactacccctgccctttccaactcccgttttgaaattttccagaggtaactgctattaatatttggtacattctctttcatattttttcatgtatttttgacagttaaaaaaaatcacatgaaagataaagttgtacatcttgagtcagttactgaagggtttttttgaaataggatttcagtagaagattaagacccttagttgactaagtttataaactggtggggatgtaggcaattatgtaaatgtatagttatgagaatatgtggaaataaagtaattaagtaaaaactggtttcactggtgataaggaaaaaacagaaaagtgacccaagtggagtagggttgattgggaaggtattgggtttcttttatcacgagaatgagaatttcatttagcagaagatgatggagaggccaggtgcagaagtagagtggcaggtagcaacagaagaggagcaggattgaggtggaggaatcaggtgattgtagcatacactggactgaacagtgtgaaattatctaggctctgcagcaaggaagaattagaaattatggcagcaggtgtaagatagcgtataaccaagagggattggagttaggaagtcctgtgaaatttgcctagatcaggtcgctagcactggaatcaaacaggagcacatgcagaagaaaaatcagcataattttcagtaaggaaaaacaagcagttcgcatgcctaggagacttctagttaaatatgtcatagtttctccaaatttaagcaaatcataagccaacagtaaagtaaatcgtaaacttacagtaaagtaaaacatgtatattggatattatggatatccaattatggataacattttagaatacattttaatgcaaaaaataaatatttgatcaaataaggaaaacttcatcactactaactgcttacatggagaaaataggatgacttttctatggataacattttaattatggataactttttaaaaggcacattttaatgcaaaaaatataagatttgatcaaataaggaaaactatcactgctaactatgcttacgtgagaaaataggaacatgaaaaaaaaagcaacatcaaaaaaacttttacttgacaaaagtgctgagaaaaagtggcacaatcttaaatcttaagagagagttactgaatttaatccccaaaacactattataattgtagtttttctcatttctcaattttactaagtatgaaaactgctttgaatttttttaaaatttatttttatttttgtttttttttttggagacagagtctccctctgtcacccacactggagcgcagtggcatgatctcggctcactgcaacctttgcctcccgggttcaagcaattctcgtgcctcagcctcccgagtagctgggattacaggtgtgcgccaccacgcccgactaattttcgtatttttagtagaaatggggtttctctatgttggccaggctggtcttgaactcctgacctcaggtgacccgcccactttggcctcccaaagtgctgggattacaggtgtcagccactgtgccagcccttatattgtctttgttacctggcttagaggggttagataacttgtctaaggccatagagaatgttagacctagttttcaaacactggtctgaggccagagcctaagtgctgatccactatactttgctctttgaattctaattgtatcaaccaaattaacatttctttcaatgttttgttctcttttattgtatttcaaaacaataggctatacataactgataaaaaatggattctaaaccattggtaaaagaactgaaagaactggccactagaatctccttcattcatcttctgcagtttatttggggagtgcccctgccgatttctccaaccttaatctagtacaactatcccccttactcaccactctcctgacactggccgcctttcaaagctccctcattccagtatctttcccacctcagggcctttgcacatgctacccctcttgaaactgtcatcttcccactgttccttgaagcaaggtagattcctttcattctttacacctaagcttaagtgccacctcctcagagagagagacctgctcacgccatttaaaggagattgccccctattctcttatctctgccctgcctctgttttctttatagtctgtattacaaagacttgcacatatttatttgggcttttgggttttgactgtccctcttgagaaactctgaggacagagaccatatctatcatttgctgttttatcctcagtgcctaggatagtgcttcatacagagcaggtatttattagattggtgcaacgttgcagctttggccattacttctaatgtcaaaaaccagaattttgcaccaacccaatatttgttaaatgaatgaataattaattcatttgtatttctcctgtctacccacaaaagtcatgaaacccttattgcttgtccttctaaaatctagattgcttcacatatttccacaatctcccacttattctatgaaaaaaaaagattaacctgacatgaattattcttggtgaacccatgctggttcctggagattacactttctcccctaaatactcacaggccctacctttaataatccattgcagaatgctgcccaggatgatgtcaagttcatcagtctgcaggttgtggaaccacctgactccccttatttaaagataagaatcacctctctctggtcttccagcctgcctttcatttgcctcagcacctctgatgacaacctgcagagactttatttggagactcttagttctctggaagaaactaatccaggccaggatattgtaacatacttatagtaactgtgtttttttctagaatcccttcacccattcagaccgttgattccttcttgccagcttttgttctgccttttcccagaaaaagtagaagtgtaataggaattggatagctgagctttccatcattcatcaacattatatcatttaccatttcctttacagtctgtctcagacataactaaaaccctgtgtgtgtgtgtttattatcaaaatactttccaaaggtagtaagatcagatatctttataagtgcattttaaaatgtgccacagctgtctagcaaaaacaggtaattctaaaatagttcctctggaaaagcctgcattttaagataaaatacaattttgtagctgctataagtacaactagatatttaaaagaatgcaaagtggtatttttcactgaagttagaaaatcgaaaatttgccacatctgaaactttacaaagtgtttaggaataggccgggcacagtgcctcacacctgtaatcccagcactttgggaggccaaggcaagcggatcacctgaggtcaggagttcaagaccagcctggccaacatggtgaaaccccatctctactaaaaatacaaaaattagctggacatggtggtgggtgcctgtaatcccagctacttggggggctgaggcaggagaattgcctaaacctgggaggcagaggctgctgtgagccaagattgtgccactgcactccagcctggacgacagagcgagactctctctcaaaaaaaaaaaaagaaaaagaaaaaaagtgtttaggaggagatttcatatgaaaaaaaaatatctagattgtgttctctacctgaatatccagaatacagggcctgaagagtgataaaattaaatggacaaatctgtttttccttcttcacctgtttcctcaatcttgttttcacactcaaatattttttctcctttatacattaagtgattcttttatgtatacatattctttttcaaatttctttgggtaatttcttgtgaattccaacacaaagaggggtgtatgtgtattataaatacaaaaataaaaagtgattgcttttatactagcaccttaaaaccatttagaacttcagtaaaaccatgaaaaagtgctgctttggaaatggagaaatattcaaaagtatggtgtgatgttttcaagtggattgtgattatagtctcaatttgttgatcttgacctctagtggacaggtgcaggcttactctttgttcagtcttagtaaatgaggctcaagggaaccctgtgttcacatctgaatggatgaaatgtaggtatgggtactgtgtcctctcttgcagtatgggcacaaaactgtctttaaaaaagagacaagtagataactaacatgtcgatcttcctgtgatgaatggagaagcctgtggataatacacagaacaaatgaacgctggaaaacactaaggctcatgtaattagagataaccgtatctgtgaaactaactacaggtcctaagttatatgatactgaaagtcgtttatttattttttaatgaaaaacaatacccttgaataaaccttggatgaagttttatgagatctttgggagttgaggtatgttggggttaggcaaattgggctgactcaaggtttgggggctgtcacccccatcatcttgatcagatcacagtttccaatgacctttgtttcttcctctcatgaagaaaacaatacctgcctacaccactgaattctatttggaaatcatctcagataagaaatgacagataaagtaccagtgattagttttcagaactgtagcacttggggaagaatggacattttgtaacatatgtatatgaattaatataagacagagcagatttacttaaaataatttttgagctgagaagctgttctttcggtaacatttttcttctgaagagctcagatttcatccgtagctgtggaactgctgtcagactgcctggcttgtgctcagcccagctacttattaactggtgggtttcttaactcttcccaggcgtggattcttcatcacctacctcatcgtggtgtggaaatgtaaactgaataatctttgagagatacgtaacccagggcccggcatagcatatgtgcttggtaaatgttaccgttttctttgtggttacatccatctatgcatgctagtccattcgtggaaatgcagtcctggaatccaagggtcctgatgaaaattgcagtctttcttttttctgcctaagccttggctaaaatatatattcagcaggtaattctcctatatactattggtttactgtggagttttattgaaggatggaggcaaaatgttgaaacattatctccaaatcttcataggaaaaaaaaacatctatgaaacatcttacccagaaaattactaggaagcagatagtataaaagcaaaccataattctattcaaatttttattttaatactcataaaatgttttagttttccatcaagtgaaagaatttatctttggaatcaatagaaatatagttattataaatttagtttatgcttttacatcctggtagaaatgtagcaatacacataaaaataaaagtttcattgattttttttctccaaatgcaccatcctattttgtaaccttggctatgtgtataggaccaggaaacacacacacacacacacacacacacacacacacgacatgacctggggcatggctacagtagccataagagctcttgtaccatcttctcccactaatactaatcatcacaggtgtgtcatctgtgggaaatctacattgtcttcagctgctgcctaagactttgaaaaccagtgtgcttccttttacaacagaaatttctgggaagattcccaagtgtcccttttcatctaatttctgttggtccctccttccttttacacacttgctagttgttcctgggagctccttgaaggcagggaccttaccgtcctggcccttgctgcatcctgagagcccagcccagtgctcggcttatggtaggccctcagtaaatatttgttgaaaaatgaattaattttcaaaagtaatatttaattatctactgtataaatattttaaaggcataaaacatggtcttttgccctaaaactaaatcgcttcaattcaaaataattgaaagaataagataatattatctgctagttttaccttgcctcatgtcaaaaattttaattaaaagtaatgctttggctgggtgcagtggctcacgcctataatcccagcactttgggaggccaaatcacttgaggtcaggagttcaagaccagcctggccaacacgcggaaaccccacccctactaaaaatacaaaaaaattagctgggcgtggtggtacgtgcctgtaatcccagctacttaggaggttgaggcaggagaatccttgaacctgggaggcagaggctgcagtgagctgagattgtgccactgtactccagcctggataacagtgagactctgttgcaaaaaatttaaaaaaaaaagtaatgctttattcttttattctaactctagattcaatcacctgactaccttatagttaaaagtcttttctgaccttattaattttgaaattgagacccaacctttttaggccttattacttcattctactggttatataccccctttaaaccataagaaatgggattcacatcctttgattctataactgctagaagttagaagatctgttttactttgaaatgcctaccatttgttgagaagtgggaactgttgtgtatcaggaaatgaagaaaagtagttctacctattaacaaagttttccccccaaaaagacaagagacagtgggacataggtaaaagtccacatagctgtcactcctggatgtttctgtttacaccggatggataccagaatcatgctttcattctctaaggcagcatgtttagagtattggaatattgtccttaggacctagatggagaggcttctaacaggatgtcctgaaaactatattacacttataagaaatgcctccaaacacccaaacacagatcaagtgaaacaaagtggtcttttgattttaatggtttgtgacttctagtgcatgtttgtccttaggtcctggtgtgtcacaggtgcatgctattccatgcagaggcacgtatttcttcctgggcttatgcttgtaatcccaaatttagggaggctgaggccggcagatcacttgaggtcaggagttcaagaccagcctggccaacatagcgaaaccctgtctctactaaaaatacaaaaattagccaggcatggtggtgcacgcctgtagtcccagctacttgggaggctgaggtgggagaattgctcaaacctgggaggcagaagttgcagtgagccaagatcgcgccactgcactccagcccgggtgacaaagtgagactccgactcaaaaaaaaaaaaaggccagttgtggtggttcacgtctgtaatcccagcactttgggaggcctaggtgggcagatcacctgaggtcaggagttcaagaccagccttgtgaaaccccgtctctactaaaaatacaaaaagtagccaggcatagtggcgtgtgcccgtcatcccagctacttgggagactggggtaggacaatcccttgaacccgggaggcagaggttgcagagagccgagaccacaccactgcactccagcctgggtgacagactgagactccatctcaaaacaacaacaagaaagaaaaccaatgtcatgtgagttacacaatcaaatcagaaaaattttgaggaaagaagtaaataatcttaatctctttatctctgattctctggctctttgggtgactagttcttttaggtttaaaaactttatatagtctttgattctgtggtaattttattctgctatcaagtgaaaggataaaatctaatggcccaaaatatacttaatttgaattttttggttaaatatattaagtggctaaaaaaatatcatccatctggaatttctgaacctcacatctcaggaaaaggatatctcatgcttgccacctctatgtccagtaaatgactcctccaagaaagaacttggcccaacccttgaaagctctgctctagtccccaccatttgtaacaagaaacacattcaggtgtggcagttacgtggtctttggcctgtgccttttttctcttgtctctttctggaattaggaggactcacttctttcctctaactgatacacacctcaagtcacttgagcccacttctcaacataccctaggttcccatcagtttagaacagtgcttctcaaactctttggtttcaagaccccattacatgccataaaattatcgatgaccccaaaacacttttatttgtggatttacctaccaatatttatcatattaaaaattaaaacacaaattagaaatatatatttggttataaataacaataagcccaacatacattaacacaaataacatgtttttggaaaataaccattttgtaaaacaaatgagaaaaacagcattgttttaatctttgcacatccctttaatatctggcttaggctgggcacagtggcctatgcctgtaatcccagcactttgggaagctgaaatgggaggatcacttgagcccagaagttggagaccagcctgggcaacatggcaagacccagtctctacaaaaaattaaaaaattagctgggcatggtagcatgaggctgtagtcccagctgctacttaggaggctgaagtgggaggattgcttgagcctgggaggttgaggctgcagtgagccatgattgcaccattgcactccagcctggtcaacagagacactgtcacacacacacacacacacacaaacacacacacacacatctgactcaatagaagacagctggatattcttatctgcctctgcattcaatttgttccaatacattgctttggttaaagaatatgaagaaaatgtggcttcacatatatatgtagttggaaaatgagaggcgtattttgatagccttttcaaataattgtgggtattcttcagtgatattagagcaaaacttgacaaatcatagtttcttaaaggccagttgcaaagtagaatctgaaaccctatcactgaactgtgaaaatgtattacattaaaatgcactggtctatcttgttctctgagtggattttgtagcatcatgcattgcattggtcatttagaaaatactggttcactgagtcacacagttctcccaaattttcagtcatttcagtatacaatatttttttaagtcctatttattaatagcaccactgatctcatccttaagtactgggaaactcataatattggatacaaatttcccccaaattccaatttttggttgaaaactcagattttatcattagcaacaaatactgtctattgtttttcttgacacagagtggttggagtgcagtggcatgatcagcctcagtttcctgagtaaccggggctacaggtgtgcgccaccaagcctggttaatttttgaaattttttgcagagacagagtctcgccatgttacccacgttggtctgaaactcccggcctcaagcagtcctccagccttggcctcccaaagtgctgggtttacaggcatgaaccatcatgcctggccccaggatattcttgagtgaagctggcttgcttttgcttttgccaggccatagcagtaacagttaactcctagtatactgatttcattgatgctaaggcatgacttttgctgacaattgcttttgcaccatccatgcacatttcaacacagttgtatcaggataaatcataagattcaaaaagttattcaacactttgactatttcagcacatgtgtttgttgccaagcatttatgtaatatcttcaatcattaagtggggctgataagaacaaaaataagaaaaataacaaatacagtcatatctgtagatgtgtccattttgaaagtacaagtgcaattctgcagatggtatattagtcttcatgtttatagtgaaatccgaaatttgacaaggtaccatgttttggggaagtggcactggtttcttttactaacttgtccttcagcaggcattgagcaacgtcaactgtgtaaggctttgtcattcagctagtatatgtacttttccagccaatgcaatatgataactcaccctgtaggatgctttggtgtctttttcatttctagtttgaaaacatgaagaaatatttagcttttaaaaagctcatattgtgtacattaaaaatatttttcctttatactcttatcagtctcaaaatgacaatctgaaattgttttgttgcataagacacaataaggggaattattagcatccacaaagggaggggaagatatctttcattgtgttttcatttcttcatccagttttttttttttttgaagttgatccgcccttccatgagtcagggaactctgatatttcaggttcaggtatgtcagcatcttatatgtagatgctacatgtgggaattgagaaagcaagccttctcatcttttgtttttaagccagtgatctatccttaatgataagaaaaatattgtataaataacttttctctttattttagaatattgaactctaaagcaataacagttttagatgaattttttaaaacttatgaagttttgaaaaaaatttaaaatattgcaaaacaacacagtatattatttgttgttgagttttcaaatagatgcaagggaaattcgggatttcaaagcaacaatacattggacaataatgaggtcacagaaattatagcaggtataatgaaagatagatactgcagtgaaagtattaagaacaaactgagttaatctccgaaaatgcacatatatatattctaaatctaccaccttagaaaattctaaaaaacacaagaatacaaaaagcacttgttgccagaacaaagtatcctatgtcatgtagcctctggaagctctaccatattcttgagaaaggatgaaagtaagaaaaacaaatgatgtcttcatattattgtaaaatagtttcgacctcacagtcctcctgaaaagatcttagcgccccctggagtccccaggctacatctgatgaatcactggtctagggagccatcagttttaaatgagtttaaattgtcttaaatatgcttattacactttctttatttgatgcaccttgtagaacctaaaattagatttcaggagctgctgacgctttgaatgaagtaagagatatcagaggttaacaattcaagagccatgaattctcattttgatccattaaatccttctacctttgcagcatgagtctagaagccctgattcagtccttgttaaaaagctggaaataggccgggcgtggtggctcacacttgtaattccaacactttgggaggccgaggcgggcagattacctgaggtcaggagttcgagaccagcctagccaacatggtgaaaccccgtctctactaaaaattaagaaaaaaaaaattagctgggcatggtggcatacgcctggaatcccagctactcaggaggctgtggcaggagaattgcttgagcctgggagacggagtttgcagtgagctgagattgtaccactgccctctagcctggccaacagagcaagactctatctcaaaaaaaaaaaaaaaaaaaaaaaagttggaaatagctgttttgctgttgataaatgaatggatttaaatttccacatgttgcttctccagatcatttcatgatcattcaagtggaaaccgcagcaattagaagtgttgcatatggttggaatgtaatcactttacattttgagcgttccttctaaaagcaatttcttttgattcaatgtaaaaattcataagtacatatcaggcacccatactatccaggtactaaagggaatacaaaaggtgcacatcctactcctcaattattaatttttgcggctggacgcggtgactcatacctgtaatctcaacactttgggaggccgaggtgggcagatcacctgaggtcaggagtttgagaccagcctggccagcatggtgaaactctgtctctactaaaaatacaataattagctgggtgtggtggcacgcacctgtaatcccagctactggggaggctgaggcaggagaatctcatgaacccaggaggcagaggtggcggtgagctgagattgcaccactacactccagactgggatttaagaaaatgtgtagttaaatattgcctaaaatgctcgaatgtaggttataaacaatgagaatagggcccatgaagagattttcgtttttcacagaggtgagacttaaaaaggccttgaaggataaatagaaatagaagcagagtagaagggttattccaggagaatattagtttggatgagggcacagaggcaggaagatggagcttagcttgagggaatggaggtcactggtgctgtgaatatttgcagacagccatatccagagctgagaggtgaaagaacagactggaatagttcttttctttttcactctcctaccttatttgcttttggtttagcaaggaggatcgaaagtaaaccaagagaaatggtggggggcagcagagggaggtgggagggaaactccaggatgagttatggtcagccaaaagaagctgttgaaataaaatgaccaagagttaatgcctttatagacgcagggatgcacagcctagatccccttcctctaaaggacttgctgcccatccactgaaagcttggtcagcagccagcccccagctatcggctctttcagggcctgccttgttgcaaagggccgcctccctgcaaagagctgccttgctcaaagagctgccttgcactaggtcatgctcttctggtggcagcttgcatcctgtcacagagaggcaggggtgtgaaagcacagccatctcatttgctctgcaggacaatatccactccagagttcctgctagactggccaagaccttgttgccattcaacttctttcccattctactcgctccctccttccttcacaggtgttgagccctaataaaattttgcacccgaaattctgcttcattatctgtttctggagaacccaacctgtaacattttcccagccagggctgaatacacacacacacacacacacacacacacacacacgtgctctctctgtatatatgtttctgtgtatgtatatatgtatgtatatttttatttacttttctccattcaatagtatactgcctatcaattattagcaaattgtattttcaacctgttggcttatttattctaaatatagccattttcctctaaagagaaatctttgttgccaaaagaattttataatggcaaaatcagtcattttccccactaatcgcaatgtaattttgcccattttgagatgggcaaaaatcatatgttcagaacagtaaggtgagacagaatcagctaatttactgataactgtgggcactacctgaactgacgtatcatgctgctacgcactttagtaccaggctctctggtggccagttctttgcaggataacgtggaataatgcttatgtaaaatatgacttccaagactaattctcaacttcagactccccactcccagcattattgctttggcattagtaatgttagtcagaaatatgagtaattcttggcaagaatgggaagcattcaacttgtaacttcaaaaagacattatctgaaaggttgaaagccagtttctaatagtacctggtatcttggcttcagggctcacagcaatcctgtggagaaagtatgagtttcccatttcaacaaagaaggtgaggcttagagggaaaggaagttgctcaagatttgctctggaacagagccaggattcccactcagatcttcgactctgaatcctgcaggccttcacctgtgcgagcactgagcgcctggctgccagctccagagctcctctggggccttggtcagtgtggtgttgtttatgtccagcacactttccgttggtctactggaggacagttcctgtacaggcagatgacttccttcaccaaggacctgtgactctctccctgagggctttctctgacatcatctgcacatggacagcttagactgaaagtttcaggggttcgatgccttccagaggcacctctctaacaataagagcccagattgagtggaaataccccagcttccttaccactccagcctccatgcccttagtggcatgattccgaggtgcatcctacactgactcttggtggctccctggccagagctcattcgcgtggccctcagcagctctcctccttccctggctgtcttcctcaccacctctccgtgattccaggaatcagctcccgaataaacgacttgcacccgaatccttgtctcagggtctgcttctgggggcacaccgaggaagacagcaatcccgtcctaaggttttgcacatctgagccagagggaccccctgggaccgggtctcagggctgagttttggaggagtgggagacactcagggtgcggcttgaggagggatgaggtgagactttgaggtcggcagatggcatttctggcaggcgcctagcatggaaggtgtgagaggaagagggaggttggggacagtggacatccttgggggtggtggggaaggaatcagggctgggaacctgcctctgtcagcaaagggaactgtgccagtgggccccaggaccaatgccagggaggccacgttcacccagcggctcagccaagtctttttaaggagtggaatgggaaatgccgtttactggcttgctgttggcccagtatttattgttttacatttttgccctggaatttccattgtccttactccttagaggagactacacttttgcagctaataaaatatgttctccaggttaaatggcatttcagcaagtgccatcattacatttttcagcacccagccacttacatagctcttccattttgtcctgataaaatcaccctgtgcagtgagcaaggcgagggttatatgcccgcctctgcgatgctggctaatgtgctcacagcgccccagctatgagtagcatgggtcgggggagtgcacagagcctgtcaatgtggcttcactcctgcggcaggccccaagggtgacagccctctgctggcggactcagagctattccaggagtaggctgggctggccccacgaggggcagaaagccagcgcctatagatgcagctctcttctacccatctgtcctctcgagcccccactgcagccggctgggctttccaagtcctgtttttttccattgattctagggatggcaacgtttggatagaacatcagagctcggttggtgcctgggcagtcatgaccgtgggcatgggcagggcagcatggtgacgtggggctgggctcaggatcaaatgagacaggcctgaaatccatcagagcctcttaaagcctggacaagtggccagttctttgaagggtttatatctgtattgcctagtgcagcttccagatgtgtggtttaggatgttgaaagcacttgttattgcttgtgttaatatgatgaaagcaatactaataaagtgtagtctctgaggctgatgaatgtgatctctgaggctgctttccccaaccttggggaggtgggctgttgggtggccatgtcagattcagttctggcaggatgctgggggccttccggcagcaccgatgccctggctcagaaccttttgcttgttgctccccaggggtggtcaaggccagggagcagctccaagccttcctggcaaggctagctgtggagccggaagcggggaccctgccccatccatcctccacagactccaagtccttccaggcctggccccgctgctcagtcctgctcagtcccatgtggagggaaaactccgaatcctagagtggcctgaagtctcccaagtggggagcaaggagcaggcaaattggtgccctttctactgaaatatctgcttctttgtcacatccaacaactccagggaattatgacctttcttgaccagcattttcctctaacctttccatcttcctcccaggaaagtgaggactcaacaatacaagttacaaaacccttctgctggaatcagaccaaaaggaagctctctaataagaatctattgtgaatgttgtgctgttgtgcctagatctccacaagggcacagatgactgggaattcacatctctcgctccttttaaaccctcaagtctgagtctagctgctgccatacagagaccgtttccctgtgaagcctctagacttgccactgaattgacctgccctgtagaaaggacatttctcttccctttggatagagtattgtgagaaggctgtctttgaagcctcagaagagtggcttttgtctcctttgttcccataaggaaaaagatgtcagatgagaggccaatcttttgtcaccttcccagagaccacccccataggaatctgcccctcctcccctcttagctgtaactagctagatcagggtgcgctctgacttaagggtagcctctcccaaggccactgagttgtggcctggaaaaagatgatctgggcctcttaagattcatccttcaggacgtaagtttgggaaactgagcggctgttgacatttgaagtgagagccaaagcagaaggattgtggtgcagaaagcagggaagcaaagagaaacaggtcttctccatgatggtcatgtgcaggtgagggcatgaagtagccaggagcagagtcaggagaatggagtagatgctcagagagcagggtcaatgctccacacgttcctggaaaggtgggaatgtggccctagccaactcagtctcagatcccacgagagccacccaggccaaggcttctgttctgagacaccatctctttaacatagatccctgcacaaaacccctcttttctgagccagcccaaggaggagtctctgtttctgaacctccgcttatcaagggcaggtctactggctagttgaggataatgctagaaacctgccttgtccagtgcagtagccacgagttacacgtggctctcaagcacttgtagcactatggctggtccagactgagatgtgctgtgagtctaaaattcacactgcaccctgaagacttacggccaaaaaaagaaggcaaaatatctcactaataatttttatatattgattatattaaaatgagaatattttggatatatcagtttaaataaagatattattaaagttaatttcacctgtatcgttttacatttttaatgtgaccactagaaaatttacagttacatatgtggttcacattatattaaatatttctattggataccctgccttatactgaaataccccagaaacaagaactgtagatattttagtaattacattaattagttccaatactgaaattgaagtctcaaggaatcaacacacgtaatctcctgcctccaggcatgctgagcctcaacaagtccagctaaaatggaccttcttctaaagcccctctccaccccagggaaaccctctcacctgcccccaacaattctcttcatgcccgttgcagctgccgtgccatagttgctgttagccctaggtgagattaagtatgtaatgtttatcattataaagacccatcacagattttattattaaataacctcacactgaatttacacaagatggagattaaaaaaaagaaacaacctaggatgtgtcataagatccaaggacacaaccagactctcagccatgggatggggctctctccatcttttatctgtgtacctcttaaagcacctgctccatttgtctctctgccgaccagcagcctctgcttccccagggcgggaaatgtggagactgccccccatttgacagagttgacagctcacagctccttttttgcagagagacaccaatgctactctagttcccacgtccagaggtcctggggagggattcatggcccagctagagagaaccactatggccaggagccaagccacataagaatatgactgtccccctccccccgaagctgtgtagtgagaggatgggatggttcccagaaagtagggtggggaccccaaagaaaatgagaagtttccatgatatccatgattattagtgtttgcttaatctggcctttggttaaaaagaattgttcttccatccacggagggctccagatgacacctcccactcctatatcctccttagaactttgcacacctgcgtgaaaactttcacctcctctccaactactaaaatttgataatgaaacaatctgtgaaattcaacatggacctgagccatgcagtctgtgggtggatcacatgagcagcaaggcagccatttggaagaaagcagccactaaatcacagacaatgagaggagcccctcggcagtgatgccacagatggtgatgtggcatcttcaggtgccacagatgttgatgccttcagttgatgatagggatgttttagggagccttatttaaccagattcatggcagcacctgaggaaaaatcctgtgcgggaatgagttcatccatacctactggctatttgtgtcctcccacagccatctggccctggctaaatcacactgctttggagttcatttcaaaagcccagtcatatgtatgttaaagaggttcacatatcactggctcatagaaagaaagccagtttcctgtgtgcttttcaagactgccggagggcactcccagctaacctaaagtcatttctcccactactccctatggacccttccgctgacacccggtcagcccagatgctgtcttgctcctgaacacgctatgtgcaggtcacctgagagtctatttctgtagcctgaagatggtctaaaaaggtctaaacccagctctgcctgtgaccagctatgccctccttggaaagtttctttttccttgaataaaattcaagtaattatcaccacctggcagggttgttataaaaatcaaaaaagatttaaagcacttaagctgtatctggaatacttttgttctttgaaaaaaattctgaagcacatatggcaaattttaacatgttcactggttgacttttctccatatttttctatgtgcttgtaatttttcgttttcttaaaaatgataaatattattttggggaaacagggaccaaacttgcctcctaccataaccaactacaaaaatggacaaattatataccacaactgtgttcaggtattagacaacagtcagcccaggactatatacatgagagaagaaaaattaatgaggtgaaccctctagttgccccaggtttctgcctggggacagtttctgggaccatgtggcagggagtaggaccctgggagagcatggtggtcttactgagttgaattatcagagatcagagtttggggaggctgagtcagccagactttgtgtgacaaagtactatgaagaagagagttatgctgagaaagcttccagaatctgcagaggggtccccttgaatctgctgctgaacactaagctgaacttgagtatggtgaaactccatgagactgagtaaagaagtactaggcagatataagctgaacaattcccagcagtcacacagggctacaagatacttgtattcaaccagccggaatagaaagtccacaatgagctccagagtcattcaattagagactacaaaagagtcacaccttagcagaagtgctaccaaagctaaaaaacaatcctcaaaagggtcaagctaatctgcaagtaacttaactgcctgccagagcaaagatcaacattctttaaaagaacataacaaaatccaacatggaacaaaataaaatccacaatgtccagcatccaaaagaatattacaaggcatgaaaggaagcaggaaaatgtgacccataaccaggaagaaaatcaatagataaaaattaagaaatgacagagatgatgaaattagcacacaaaaactttaaaacagctattatgaataagtttatgtagtcaaagaaaaataaatgtaatgagaaagaaatggaagatatgaaaaagaaccaaatgggatttcaagagatgaaatgaaaatttcactggatgagactaacagcagtgtatttgacactacagaagaaaataacagtgaatttgaggacatagcaatatgaacttatctaaaccaaagaaaagaaagaaagaaaatttgaggcgggagtagggggagacagcatagccttaatgacctgtgggacaatatcaagcagtccagtacccatgaaactggtgtgccacaaagagaagagagaggaagaaatagaaaaaagcttcaaaattttatagtgaatttccccctaaatttgatgagaaatataaatctatagagccaaatgtcttacacaaagatgttattaatatatgaccaaatttctgaaaaacggctccaaagaaaacatctttaaagcatccagagacaaaagaaacattttgtacaaaggagaaaagataaaacttaatgcagacttctcatcagaaacaatgcagttcagacgacaatggaatgtattttaaagtacggaaaggaaaaaagccaacccagaattctaagtccagcaaaaatataatttaaaatgttgccaataataattgtgaatgccattatcctgaatgtcgaaatcccaaagattaaaacccggcctggcatggtggctcatgcctgtaatcccagcactttgggaggccaagtcaggcagatcacttgtgatcaggagttcaagaccaccctggccaacatggtaaaacctcatctctattaaaaaaaaaaataaaaaataaataaaaataaaataaaaaaaataaaaaagcttggcatggtggcacttgctactccagccactccagaggctgaggcaggatcaccccttgaacccaggaggcagaggttgcagtgagctgaaatcgcaccactgcactccagcctgggtgacagagtaagactttgtctcaaaaaaaaaaaaaattaaaaaaaaataaaaaagattaaaatccctaatgtctaaaatcctgaaaaatcacaatcctaaaagattaaaatctcaaactgaaattctgaaagccaaattctggagaagggattagtgcatcttcagttgtacacaagatagttgcatcatattggttgcagcatgttaggcagaactattaccttgttattgtctttatttggaaattaagtctggtgtaaagagatgcgtatatgtgccaaattgacaaggggacttgtgcacttaattttaggtgtcaattcaactggattaaggaatacctagaaacctggtaaagcatgatttcaggtgggtctgtgagggtgtttccagaggagattgctatgtgagtctgagtggactaggtggggaagatccgccgtcgttgttggtatgcacaattcagtcatccagggatccagagagaacagatacagaaggtgaatgagtctcttctgagagctaggacaggctttttttctaccactttggacataagagatccagacttgacagcctctagactccaggccttccatcagcagcccccgcctgggtcccaaggctttcagccttggactgagagttacaccattggcttccctgtctctgaggccttcagacttggactgaaccacacttcccatattccagtctccagctggcagatagcctgttgtaggacttctcagccactataatcacatgagccaattcccctaataaattcctctcatatacctatatacatatcctattgcttctgtctctctggagaacactgcctaatacagatttggtattggggaagccaaatatcattccttcttactgcattccttacagcacaatggaaaagagctgtgaaattgtttccttacaaaaaaaaaaaaaaaagtgaaaagttgaaagtgtacaaggctacttaacagtgaaaggtacaaatttaaaagctaattttaggccaggaatggtggatcacacctgcaatcccaggattttgggaggctgagacaggaggatcacctgaacccaggagtttgagaccagcctgggaaacatggcagagatctcatctctacaaaaaattttaaaaattagctgggcctggtggcgtaagcctgtagtcccagttgctacttgggaggctaaggtggcaggatcacttgagcccaggaggttgaggctgtagtaagctgagactgtaccactgcactccagtcctgggtaatagagtgagaccctatctcaaaaaaaaaaaaaagaaaaaaaaaaaagttaactatggccggatgcagtggctcacacctgtaatcgcaacactttgggaggctgaggcgggtggatcaccaaagatgaggagttcgagaccaacctggccaacatgatgaaaccccatctctactaaaaatacaaaaaatgagccgagcatggtggtgggcacctgtaatcccagctactccggaggctgaggcaggagaattgcttgaacccaggaggtggaggttgcagtgagccgagatcgcgccactgcactccagcctgggcaactgagtgaaactctgtctcaggggaaaaaaaaaaagagagagagagagagacaattatttttgacgctgcaaaaacagaaaattgcttaattgcaacagccaagcaataaccagaatttcaaaaggacatcatatacttacaaaatttgtacaccataaccactctccaaatgcaagttcaatgagtgtttcaaagatcatagaagtgaaaatgcaggcaaaaaagacaagaaatctcccctgctaaattattcaattgtgtgtgatttctgccccttcacacatagcaccaatttgctatgctatgtatttcatcttcacatcgtttccagtactaagtataaattgtataaagacttttagtgagttctaatttgttttatgacatttttgcaaatgtaatttcacaaaaatgcattatcacagcattgacttcgttgtataagtattgcccacgtatgtaaaatattgaaacttcctcagtaaatgaaaagatgttctttttgtacatctgcacttgagaaggataaaatgtctcaaaatcttagctctttgggccacttcatatacaatggtgacccaccgaggtttttgattaatatcatcaaaagacttaggttgcccatcatgttatttcaaatgacagcagttataaagctgggtgcacacaattactgaccatactgatatgcatttatacattttgctttttcacctattcctttatgaatgtgattcatctgcttataactgttatatccgtgtgactgctgttagtatacctgagagtttatgcttgtaaaaatatgtatgttatgattgcctattttattgggtaaagtatgaagtgctctgttatgtctttatatgtttctcaagtaaatctctctttaaaaatgtaaataaatgtctttaaagaattttttgaaattagttttcccaaaattagattttcagactttaatgtttcagcattatgattttcaagactttagggattttgatctcttggaattttaacaggattatggcatttaggattatgtcttttaagattatggcacaaacccaatttaaaaatgatggtgaaatgatgactttttcagatagacaaaagatgagagcacttgtttctagtagtacctgactttaaaaagtatgaaagttcttcaggcaataggaaaatgatgtcaagtggaaacttgaatcaacacaaagaactggagagactaggatatggcaaatatgtggataaaaagaaaaggccttttttccttttcctttatttaaaattagtttttaaaacagtgatttaaaacaaaagaatatattgtgatgttaataacatacagcagtaaagtaagtgtatgacaacaatataaaaatgaaagtatatttttggaaagtttttatattatatatgaattagtgtaatattatttgaaggtagaagtgatatattaattatgtatattttaaaccctattgcaactactaaaaacaataaaacaaggtgatatattttgcaagtcaatagtggagataaagtagaatactaaaaaatgtacaatgaatgcaaaagaagacaaaaaggaataaaaagggaacaaagaacagatgggacaaatagaaaacaagtagcaagatggtagatatatatctgacttaatcatcacattaagtgtaaattatctaaacactataattcataaacatagattgtcagactggatataaaagcaagacccaactatacactctttaaaaaaaaaaaaccctaaaatataaagatacagttatattaaaggaaagggatgggaaaagatataccatgcagtaataccatgcacaacattaattgtttaaaaagccagtgtaactatgttaatatcaaagtacacttcagaacaaagaatactgtagtactgtggataaagagaaacatttcataatgataaaggggtcaatagatcaagaagacaaagcaatccaaaatgtatatgtacccaatatgaaaactttaaaatacatgaagcaaaaaaatgacagacctgaaagaagaaacagacaaatccacaaaagtagctggagatcccaaaattcctctcagtaagtgatagaacaaataatcagaaaacaaatgaagatgtagaagacttaacactatcaactaacttgacagaaatgacatatataatacacttcacttgacaataacagaagacacactttttcgagtgcacatagaacatttaccaaaatagactataggctgagatggagagtaagtctcaaaaaacttacaataatttaaataatccagagtactaatactaatatgaatggtcatactaatttgaaattaaattataagtcagtaacagaaagatgcggaaaatatgcaaattcttagaaatgtaaaactcacttctaataagccacaggtcaaagaagaaatcacaaaggggatggaaacatatttgaacctaatgaaaatgaccatacaacatgtcaaagcttgtgagatgcagctaagcagtgtttgaaggatatttatagctttaaatgcttatattagaaaagaaaatagctttaaaatcagtgatctaaacttctagcttaagagtgtagaaaaattagagtacattaaacctaaagtaagtagaacaaaagaaacaataaaggcagaaatcaatgaaatggattgaaatcaatgaaatgaacaaataatagaataaaatcaatgaaaaaagctgtttcttcataaatatcaataaaagtaataaacttctagctacactgatcaaggaaaaaaagagggaaaatatagattaccagtatcaggaattctttataaattaaaagatcttataaacagaataataaggaaatactatgaacaattttaaataaatttgacaatgcagagaaaatgaataaatttcttgaaagatacaaattaccgacattgaatcaagaagaaatagaaaatctaagtagccctatatctattaaaaattcaatttttgatttacaagtttccataaagaaaatatagcccctggcagcttcactggtgaaattctatccatcatttaaggaagaaacacaaatgttacacaaactctttcagaaaatataggagaaaggaaagcttctcagttcattttaggagtccagcattaccaatactaaagccaggaaaatatgttgtaagataattaccaaccaatattcctgataaacacagacaaaaatttcctgcaaaacattagcataaagaatccagcaatatataaaataaataatacatcatgaccaaatggggcttatctaaggaatgaagagttgatttaacattcagaaattaatcaatgtagttcatcatctttacaaagtaaaaaataaaaagcttacagttatctcagatgcagaaaatatgtttgacaaatttcagcatcatttattataaaactctcaccaaactgaaaataaaaaggaatctcctcaacctgataaagaaaacctagggaaaacctatagctaatatcatccataatagtaaagactgaatgctttcttcccaagaataagaacaaggcaaggatatcaattctcaccactcctattcaacattgtactggagggctagtcagtgtactggctggctgtttctgtgaagatttctttttggatgagattaacatttaaatcagtggactttgagtaaagtagattatacactataatgtgggtgggcctaatactatcaattgaagactttaatggaacaaagactaacctcctccaagcaagaaggaatttgggcagcagatggcctttgaactcgaactgcaacgttggctcttctctggatctctagcctcctaggctactctgcagattttggacttgccagcccccataattgcataagtcaattccttagaataaatctctctgaataaatatatgtatgctattgtctaaatgttgatttccccaaaaaaatcatgttagaatttaattctcaatgtggtagtattaagaggtgtggcttttaggaggtgattaggtcaggagggctccactctcttgaatgggattagtgaccttatagaagaagctatgaggtcttgtagaaaaagttaccttgtagaagaagctatgagaagcctgtttgtcccttacatcatgtgaggatgcagcaagaaggcaccatctttgaagcagaaagcaagccctcaccagacactgaatcttttggcaccttgttcttggacttcccagcctccagcaatacatttatgttgtttataaattacccagtctaagttactttgttccagcagctagaaaggactaagacatacacatgtgctcacacacacatccttttggttctgtttctctggagaacttcgatgaatacaaataatagtgtttaaactgtcaggctccgcacagtggctcacatctgtaatctcagcactttgggaggccgaggtgggtggatcacttgagtccaggagtttaagaccagcctgggtaacatatcaagaccccatctctaaaaaaatacaaaaaattagctgggtatggtggcatgtgcctgtagtcctagctattcaggaggctgaggtgggagaatcacctgagcccaagaggttgaggctgcagtgaaccatgatcacaccactgtactccagcctgggtgacagagtaagaccctgtctcaaaaacaaaaacagaaaaaaacagtcagttattcccaaattgctttatagattcaatgcaatcccaatcaaaatcctagcaggcttttgtatagaaatttataaaatttctacaaaattattattttatggaaattattctaaaatttataagaaaatactaaagatcttaaatagctaggaaaaaaatgagaagaaaataccattacataatttagatgccctgatttcaagacttaatagtagtgtttacttaaaatcacaaaatgtgtaagtttggaaaggataactttatttcttataaagggttgcaacctgaagacttggaggcgtagcctctggcagagactgaaagcaggcatttcgagggagggagtgtgttacaggagtctcatgcttggtcaattggatagacatacatatttaacaggttacaggaagggctatgaatatgcatgaggggactttgcacgcatgcatagtaagcaaacgtgttatgtatgtcccatgttcactttggggggaaacttaacattaaaatgcagtaaaattaggctgtgcacatcaaaagttaaaacgaaggacacccacgtgctctgtgtgcagcctccgtggacacgccagagccagtccgtggtcagcagtctcttatcaggaaggaatgctggttgattgttctgttgaaactgaaaggggagggaagtctggccaaggtaccaggttgttgagtgagtcttctgttcttgttttccagggctggtttctgttcaactcttagggaaaaagtctaatggtggtcagcaagggagagggtaaatgaggcatgaccaacctcccatctcatcatggccagaaaacttagtttttaaggttcttgggggtctctttggccaaaaggggtctgcttagtcagtcagggagctttggatttcatttttgtttcacggtagtaatcacgactattggtattggcataaggacagaaatataaatcaatagaacagaatagagtccaaatatagacccacacttatttggtcaattgattttcaacaaggttgccaaggcaatttaatgaggaaaggatgttcttttcaagaagtggttccagaacaataagatatcatgtagaagaagacaaactttgacccttaccccacaccacataaaagtttacttgaaatggattatagacctaaatgtaaaagcgaacactgtaaaacagcaagatgaaaacacaggagaaaacttcagccatctctggatggataaagatttcttagataggacacaaaaaacacaaactataaaaggaaaattgataaatttgatttcataaaaattaaaattttctactctttaacaccgttaaggagataaaaaagctacagacttggaaaaaatattggtaatacatgtatcttacagtggaattgtatcttgaacacctaaagaactcttactagtcaattattggtaggcaaatacccaattttaaagtgggctaattattttaaactaatttaaatccagactctcatagaagatatacaaatgtcaaataagcacaagaagatactctacattattaatcatcagggaaatgcaaattaaaaccacaacgaactaccactacacacttactggaattgctaaatttaaaaagactgacaataccaagtgttgacaagtaagtggggcaacctgaagtctcatacattgctgttgggaatataaaatgattaatgaactttggaaaacaattcatcagtttgttataaaatttttcactcatcaaatgactcaacagttccacctcttcatgtttatccaggagaaatcaaaacatgcctacacaaaggcttgcacacaaaggttcatagaaactttattcattaaccccctaaactggaaacaactcatatgttcacaaataggcaggaggatagccttgcaatggaatgctactcagtattacgaaggaacatctactgatacatgcaacgacatggatgaatttcagaaatatgctgagccaaacttgccaaacatgaaagaccacttactacaggattctatttatgtgaattctagaaaaagcaaacctcatctacagtgttggaaagtagatcagtgattggctggagggagggagctggtgactgatcacacacacaaaaaaaaacatgagaatgatggcatttgagaatgatggaaatgcatacagttgtcctttcatatccaccaaagaggttgtttctaggaacccagccaatgccaaaattcaggtcctcaagtcccttatataaaattgtgtgctatttgcatataactcacccacatccttctgtatacttaaaccatctctagattacttaaaatagctaatacaatgtaagtggtatggaaatagttgttatgctctattgttcttaaaatttgtattgttgggtttttttttatttttttttatttttttgagacagagtcttactctgtagcccaggctggagtgcagtggcatgatctcggctcactgcaacctccatctcccaggtttaggtgattctcctgcctcagcctcccaaatagctgggattacaggcgtggtattgttattttttattgtggttttttttgcaaatattttctatctgcagttggttgaattcatacaaggggagctgcaggtacagaatgttgtcttgtatgttgattgtaatgatgattacacaggtatatacatttaccaaaactcattgaactgtacacttcaaatgtgtgcattttcttatatatgtaaattaaaactaaatatagttgatttaataagtgagataatatgctgaagcccccagcaccattcatggtacacaataaatgcttagcaaatgttatttctcatctcaccagcaccacctctttaatttctctctgtgttcctgctcttttcacacactctcagcgtaatgtgcttctcatacctctctgcctctccgaattcctcccatccttcaatgtgcagcttaaatccttctagcctgaatgttttccaggttactccaggtcacagtgcagaacccttaaagcatccaccacttgcttctccaaaattaagcatggttgtgtagtaacatgtgtcattcacaacttgtttgatgcatctatgtcttgctttaccattgctttcgaattctgcagggatgagtactactttttctccactgaaacctcaccactggctgctacaatactgccaggagttgtttctcattgcctgggatggagcctcccatctttgctggaaccctgtagatcttctgccactggacagagagcccctgggggaaagaggctggtctgcaaagacagtgtggttgcctttgcagcctagctgtcctggtttgcatctcagcccttcctgctgcctacctgtgtggccctggccaagttacctagccaaactgatcctcagcttcctcatccatttcttgggtggtattgttggagtgaaatgagagaactgtgtcagcacctggctgccatctgccgtcactgagagttgggtgaatgggtgcaagaccaggttcgcagtctggcagggggtatgtgaaactggtatgcaggtaacaccttgacctgtgtttttttttttgtttttttttttttttttttttttgccagttttaaactaatttcccctgagaggagagaaacaggctgggtctctgagctctgcatccctcataaaagcttggtgtgtttcttcagccccgtccacacatctggttgtacttactgctccaaaaatgtatccatcctgcctaccatgttcacatttcagaacatggggcagcctcagggggaaaagacctcataaataccaagcattaaaaaaaagtaatgtcatgcatttacatacttccagaagatgaaggtccaggaacataactttctctgcaagaagcaggcaccatgaacacaagggctgacctgccagggtctccctgggtaaggaaaacccctccaaagcagtgaacagaactttctggctaggaacccagaaaataaaagattcttttgtcttcctaggaaatgctcactttcaaccatgagaggaataacaaggagaggtcaacagatgagacacctggctctgcctttcaacttcctgggtgaccaaaagcatgtcactcagcatccctgggctctcttacccatctgtgcgtaattgcttctctccactgcagctgtgactctgtgaacaactctgaagtgagtgaggcagagatatttgtcgacgtgtttgtattcatgtatgttcatgatgcctagaatagtgcttggcatgtaatacatactccacaaatggttttgggttttcttttttttttttttttttttgagacagagtcttgctctgtcacccaggtatgacctctgctcactgcagcctccacccccagggttcaagtgattctcctgcctcagcctcctgagtagctgagattacaggtacacaccaccacacctgggtaatttttgtatttttggtagagatggggtttcaccatgttggccaggctagtctctaccaccattctgcttgttggttttgcagtggctgtaggcatttccccctttctgttgtctcttctctcttccaccttcccactcccaatgtgatggtgtacatcctggagtttctcactcaagggtctgtctctgaggatcagaccaaagagaactggcttgtgttgtagtagaaggttaggtccaggctacagctgagcaaaggctgtcaaactttgagagaagttatgaaaataggtggggaatctctccacagaaactctattggggaaagatacaataaatgttttcctcagcgtggactagctcctgtgttgacacatgaggaggggcatgaactctacaggcccatgaacagctcacaggcattgtgatgaggccagtgggctcaactagagatgctctgtgtgtgacctgctctgtgtgtgacctgctctacactgactcacaggtctttgaggttaaagagctgctgaaatgcagtagtgttgcctgaggacagagtgaaagaagcagagccctgcctggtgccctgaaccagcccaatgcatggctttgaaagagagaatagagaagggcccccaccaaacctgcttttccatgagtcccctacgtgtccttcagaaacctccttacaaccttagttcacctagggacacattggacacttgcctgggttccagcacaacttcaatggccaggtcagttggggccaggcaggcaaggccatcagcctacaacaaccccttctctccttctgtccatttcactatggtctcagtttgcaatgggaggagagtcatcacactctcagctgagccgagtttcctccagggctttccatcagggctggagcctttgccaaccatcccgcaaattccatattcactaacaaagctgggtccttggacgttgttatgagcacctgcaatgggagaagatggaggtaatggggagtggatgtcatgattgcggtttggacagagaggagataggaacctctgttcatgtgtcttacttcactagctttgtctgtggcagttggggataggaagtgatggtccatgactgacaggtaatatgaagagccgggttaaactgagctgaactgagctaaaatgagttgagtagagcttagttgaaccaagctgagctgagttgagctgagctgggttgagctgagttgagccaagctgagtgaagatgagttgagttcagctgagctgagctgagatgagttgagttcagctgagctgagctgagttgagctgagctgagccaagctgagttgagctgagctgagctaagctgatttgagctgagctgagctgagccgagctgagttgagttgagctaagccaagctgaaatgagctgagctgagccaaattgagctgagttgaactgagccgaattgagctgagttgagctgagctgagccgaattgagctgagttgagctgagctgagctgagttaagctgagctgagttggaaagacaaatcctaccctcttagaatccctggggatgaggcaccctttctgatgccagagattgagtttgttattctcaaaactgtttctggcaactgagaaagagtcatgctttacttgtgatgagacatccctgaaaagcacatctaggtcctctctgatcctcagaggagcactctcacgagtgttcctataaagcccctccctctggcccgcccctgggccgcccccttgtcctgtgcaccttcccacccctactcctcatccccacgtctcctctctgctatcactcctcttgtcccatggatgggaatgacttcccagagccttctccatgggcccctcaggaacaactctgctccaagagcttctgcatttacccacccatacattatctccatttgctgtgtttgtccctgggtcgttttccctgaataattgtgagtactatgtaagagagtcttgtaattcttttgtgtctcccagaatactgagttccatatataaaagtatataataagtgctcaataaaggcttacctcatatcttatagtgtacttttaattaatgtatttatttggcttgggaagtctaagatcaaatatagtgtagttttttttttaaagtttgtgttaaaacaggtatgtcctcagcttatatcttaagatgtattactgagaaatgtgttttttctctaactccaggcttgagtgctctgaagttaatgaagagcagtgaactaagagtaaggatattaagaccatgacccagccctgccaccaatttgtgtgcgatctaacataaatcatgtaacctttctccacatttccctacctgtgcagcaggtcagcacctagtcttacggtgttgcaagcatacaatggcacaaagttttggatgagcttgttaaatgctgaatacatgaaggagattattattctaagtggcacacgaagaatttattcaacaaagctgtattgatgatttactctctgcatcagctcctgggactgcaagtataaaagtgattcagaccttgcccttgggaagccggggagagactcaaatagctaacagcagggtaagtaagccttatagtgaagtgccaggaacagaggggaaggaggcaggaaagtgtgggagaggggtatagaagggagcagcatttgaagagatatcaaagaagtcaccagatgtcaccagaaagaaggggaataggcagtagcatattcctgacagcgtgctgaaggctgaaggcgtggcagggcagtgagtggtgccttgtagctgcagcagcaatgatcagggtgatgaggctgtgtggaggtgaccagaggcccaaagagatggcagcagtggctgtgacgctgcaagctctgttactcgagtggggtgtggtggggcgggagtcgtgtgggctgggggaggtgtcagaactccttgggcctctggccaggtgcaggctctggcatggcccggaactactgggtgagcgggcagcccaggctctctagggagctctgttggccatgggcagaggcacaaggcctggtccttcccactctaaggagctgcaaagacagagaaggccagggggaccccggggcttgcaggtaggaggtagagaggaggctcagggccagattcttctcctgcttcccaggtaatgtgaaggtctctctcctcccggactgcactcgcctcgccttccctctgcacgtgttgagttcttcctgcctctccccggctagggcctggcttccacatcactcttctgtgggccctccttccccccggtcctctttgctgttctccattctctatcacagtttgttcctttcagggcacttaacacaatttgtccgtgttgggctttctagctcttctctccccacaaaagtgtcagttccatgagggtggggacttcatctcgtcccaaggcattgccagtgcctggcacacaatgtgtggcatacagtaggtgccaaataactgactcaatggtctggccatgcagcatgacttcaagagcatagcatttggacatacagtattgtctccgggttaaaggagggatccacatccactacagtagagaccaagagattggggtctcactgttactctgaaagataagtcacattaagtgtcagctctcctccccttctagtacagagcactcgataatccggagtggattcagtcctaaatccagcctggttaaaggacacccaggcttgcacatataagggtctctcagcggaccccagccagctacagaatatgggaagaacgggcttcaatgggcaaaagctgccgtttctttacttagcaatacatgtgtctttctaaataacagatttaaataagtaaggcaaactgtgaaaatatgtggttaaaaatgtaaggggtggggtgggaatagagaatctagcagatggttgctgtgcctccctctgtgacaggtgggatagaatcatctgcatgagcacatctctaaaggtcttctttttcatgggcacatttattggcatactgtagaatgagccctgtacattcaaatagcagagtcggcccagcccagaacagctctggaaaggaagaccttggccttggctgtgcctcacttatgacaacagagctgtccctcatcaaaaagaggaaaaggagagaaaatcagaaatgcctggtcaaaagtgaaggtggggcaagcagacctgaagctagtccttggggtgagtggctgagtcacagcatcccacacacatgccacctcctacagccccttggccttctgcccatacaggctcccagcccacggctcactggtcactcttctttccgatggccagaaccacacgctgcaggtgacccttgggaagaccccgcctgggccactcattggttcgtgtgaagaggcttctgtccccagccagacggtgccctgcttggaggcagaggccaggcgatgtcctccagtgtccccgtggccagtcatcggctgcccctgtccaaggcatttccacaggcatttcctgccacacttgggcacatttcccaacatgctcatcagtttggggacaggctccatgggtggggtcacttctcattagcatttctccccctgtggttcccactgcctgtcctgagctcgccccctcatctgtgagtgcagaagcctggaagcctgagctcatctgcctggatgatggcagggcgagctctcctagggacaaatcatgagctcagggatgcctgccatgtatcctgctcgtctgggcaggccctgctaaaccctatgtgtgcacagttgtgttaaagccttacaaccactccaggaggtggtgtcgtcatcaccatcctcaatcttcatttcacttataagaaaacagagacatagaaagacattggccgaggtcacagagttggtcatggtgggccaggattcaaactccaccagtccgacctcctgctttctgctctaaactccaactagtctgcagtggtattgtataccgcaccctgacctcacctgtctcacaatgtcacaggcacctgtgtgaaggccacaggacaagtgcagcctccaggcaggaggctgcctcttggcggtggtgcccttggtcaagtcactgccccctgctgagcctctgggctctaatatggggtttatgatagaagctgcctccttaggggattgggagaattaaatacgctcatctgtgtgaaggcttagagcagcgcctggcactgggagcactcagtagcacgcatcgttatcacagttattaataatatgattgttcccaagggaacattccaggtctgtctgacctcctctcctctccaggaggaggcatctgtgcattgactaccaacatctctctttttaactaatcgctccatctcattcttccaccttctccatttctcctcccaaccctgacatgccattgaatctgtttaattcaagcaaatgctcagagccccagatccctgaatgcgacagattgagagggtgggggtgggggtggagaatggaggagcttgtgtaataggacataaataaacttgcacatgctcttctttttaattgcagattctatcccatcgcggggcaatttttattttgccttctcttgaataagtgggaagatgttttattcatgtgtatcttcccagcacgcagcccagtaggtgctcaatgtgcgctgaatgagtcggtgcattcggttcggctccagccaacacgtatgccaggcgctgttgtaagtgcctcacatatacaagctcattgaacactctggtgccgttttaaagtcctggagctgagcactctaaagtccggccaataaaggaaatgtgtttggtagccaccctcttgatggacataccactgaatctccagcatgagctgtgtggctcccggttcctccccgcttgcttgtggcactgctcccctctaatatttaggaagagagtttcagcacaaacttccagctgggtgaatggtggggcctgagggacggtgacaaagctgaacacacacctcgagggacctccacgttttccagtagggtttgatttgaacagtgccaagaaatcccctcagattgctggaaactgcaaaccatggaggcttaacacaccatgccactgcctggccagacaggcctgggttcaaatcccagtcccaccacgtgtggagccaattcctcgctgagccacagcatcctccggggtggagcagggcacacaccctgcctcgtggggctgtggcaatattacccagctcaccgtgtgacatttagtgggcaccttcctcactctgacagccagctgagcacaggccactaaggaaagaagaattctgagggagagagaagaggccaaagaaagacagaaaggatgcctcctccaagagcagtcaggccggggtgggacagggtggtgggcggaggttggccgggagagagccatttaccggcacagtcaacaaacaaggattgggaatataaagctcggcattgtgctaagtgctgaggaagtaaaaaggaatttttatttataatttataccccacctacttccaaagagaattttgaaggtgactcacaatgaaaaccacatatgccgcaagatcacgaaaatagaaatagaaaatcaagtccatggagatgaagaaaggaaacccacatttatttaccccaggtgccgtgtccttgaatgcactccatcatttagtccagcaaccccattttacagatgaggaagacaagcaaagaggcatgtccagggcaggcaaaggtgcaagcagggctgacttctccaataggcgcagggcccaggatactcttaggggcccactaaaatgttttaaaatttcttttaaaatcagaagaagagaagagaacattgaggttgaaaaaatgttttaatatatgatattaatagattcgtctttatgccaacacaatagtaacatatatttaattttttaatggaggagggagtccacaactataaaagtgcctggagtctacaaaagtcacaatccagcccaggccacaaacccaggccagccaaactccaactcttgtgccccttccacacttgtgcaagaacatttgttgtcactgaatgtaacatgcgagtcagctctgcagctgaaaagaggccacaatgagataaatcttagtttcataaaaaggatgtgcagtggggaaacatttactcacactacaatgcaattgtggggaaaaagtgtaacttttacaattttctttctttttttttttttttagcgatgggttcttgatgtgttgcccaggttggactaaaactcctgggctcaagtgatctgcctgcctctgcctcccgagtagcttacatgccactacacctggctaaaattttctttataatgaatgtcttcttatcagtttcactgggaagcaggcgggtaaaatcctaaattgtatccaatttggtaaatttcaagcttgatttagtaatcaaaattgtctttcatagataacttggctcactcacgtaaatgtcagccttttggagactgctctctctggctgctgaatccccgtgtggcaggtgattcctatcagagtcttgcacagcccaggagggaggcccctgggttcccgtggcattgcctggatcttcacagcctgctccttgagctcatgactgctatgatgggatggccccatcttgctttctggggcgctgtgccaggagctgtcgctggagcccatggtccctgccagctttcctagtggtcactcagtcctgtcaccaggcctctgcctttctgctggcactctcaacacctgctcaggtgctgtctcaggctcccctacctcctacttcctgcgctacctccaggccttcatgtgggtgcttctcctggacccagcgtacctggagaagggtgcctccagcccagacgctccctgcggccttcagacatgctttaaaagcatgtgtttaaaagctcccaactttctaggttgtgccctgacacactggtggggaaggtggggaaggtaataatggtagtggcagagaagagctctggtgcctgatctacctgttctctccctatcccccttccccttcccatagtctatgaggatagagagataaactttccttcatcatcttctaaaatgtagtcagtcaggcctacctcttgatgtgctaaaagagggtcaaaggaatttagtaaaccttgactctctcgacatctagctttctgtctgagactcagacattaccccaatgtacaagaaactccagaacaacaaggtttacaggacatgaaaatgtatctaaagacaattccagaaagtattaatcccattgcagacatatgttagttcaacaggagagactaactatactgacacttaattccaacacaatatattatatgaatccttatgtagggaacatcgaacaacacgatgaacaccatctcaaatatttatttggcaaaccttcttccaatagctgtttgttctatcaaccctcaataaaagtaggccagaacattaggcacttccctggtgaaagggcctgatcttggtgagtctagttgtgctgtatctggtgttcttacatctggatgcaacttagacaccccagagacaatggcgtagcatagcacatgtcgcttctttcagccagtgctaggatgtgggaacaaaggcacagtccatctctctcaccctgaagaagggcagagagagcttcaaaaagggatatgggcacagccaacctctcaaccatcacaattttttttttgactattagttatgattcaaactatgaagcagaaatggcttgggagttttgagaggaaatgactcaacaaatacaaaatattggagaagagatcagactccaggatcttctacattcaggctagagatatgcaactatcaacagtctggatatagctgggtggttcatgcccataatcccagcactttgggaggctgagatgggaagatcgcttgaactcatgagttcaagaccaacctggacaacatggtgaaaccctgtctctatgaaaaatacaaaaattagccaggcatggtggtctgcgcctgtagttactactcgggaggctgaggtgggtggaagccttgagccgaggaggtggaggttgcagtgagcttagattgtgccagtgcactccagcctgggcagtagtgccagaccttgtctcaagaatgtaaagtctggatataaattatgattcttagtctcactctagaaggctgtgggtagttgcttgagccagaaagaagatgattgtgaggaaaatcaagatctttgcattggaaagagatcatctcgtcgaacgagactttgaggtggagaaaaaaatgcatggttactatcactacttctattaatattgtacgagaaatcctacccatttcaataaagaaagaaaaggaccagtcatggtggctcacacctgtaatcccagcactttgggaggccaaggtgggtggatcacctgaggtcaggagttcaagaccagcctggccaacatgatgagaccctatcactactaaaaatacaaaaattagccagctgtggtggcacgcacctgtaatcccaactactaagtgggctgaggcagaagaatcacttgaatccaggagacggaggtttcagtgagcaaagaccatgtcactgcactccagcctgagcaacagagtgagactccgtctcaaaaaaaggaagaaagaaagaaaaagaagaaagaaagaaagaaagaaagaaagaaagaaagaaagaaagaaagaaagaaagaagagagggagggagggagggaaggaaggaaggaaggaaaagaaagagagaaagaaagagaaggctgggtacagtggctcatgcttataatcccagcactttgggaggttaaggcaggaggatcacttgagcctaggagtttgagatcagcctgggcaacgcatagaggctctgtctgaaaaaaaaaaaagtaggcaggtgtggtgtcacacacctgttgtatcagctactcgggaggctgaggtgggaggatcatttgagcctgggcgatcaaggctgcactgagccacaattgtgccactgcactccagcctgagcaatagaatgactgcctcaaaagaagaagaaagaggaggaggaggaaagaaagaaaaaaattaagtcttaagtttgggaaaaaaagagaaaaaactttaaatatgtatagacaatattattgggagaagaaggaggaggagaaaagaagaagggaggagggaaggaaggaaggaaagaaggaaggggggagggagggagggagaaagaaagagagagtgagaaagcaagcaagcaagcaagttaaggcttaagtttggggaaaaagagacaaaatgttaaatatgtagagacaacattattgtgtaaatagaaaatccaagttattagaccaagtaaaagagtttagcacaattgctgggtataaagttaacatgcaaataaacttgagtttatttcaatatgtgaacagtaaacattgagaaaataaaaaattttaaagtgatcatttatacttgcaacacaaatgaagtatttatgaataagtctaacaaaatgtatgctaattttgtataaaatattaaattttattgggagacattaaagaatgcattaataaatgcagagacttactatatttatggatgaatgagtctatattgtaaatatgccattttctccaaatttatatgtagattcaatgcatcacaatcaaaatcccaacacatttttgcatgtagaatttggtaagcttattataaaactcatatgaaaatgcaataattataagaaaaagaaggtgatggaattgccctgccagatatcatgacttattataaaggcatagtaattaagaaagtgtgacattagcacaggcatagagaaatagatcaataaaacagaagagagagccatgagcagacccacacatatatggatacttgatcaatatgactgactgcagattacaggggagtggggaaaagactttttaagaaattattccggggagggaaaaaaagagctatagggggaaaaaaattgaatctctatttcacaccacatactaaaatctctttaatttggaataaagagctaaatgtgaaacgtaaaactacaaaccttttaaaaaaagagagagaagcacatacctttgtgctctcagaacaagagttcttgaatgagatataaaagtaaagaagtagctaggtgtggtggctcaagcctgtaatctcagcactttgggaggctgaggtgagtggatcacctgaataaagctagaggagcagaagttgaaaaggtataagtgaaacgagattgtccatgaaattataattgttgaagctgagtgataggtacaaggagattcatcatattattctatctacttttgtatatgtttggaattttatcataaattatttttgagagagagagagatcaaggagggactataaagagatgaaaacaaaccacaaactggaactacacatataagcaatgaaggactaatatccagaacacagaaagaactaaaaatcaaggggaaaaaaaccaattttttaaaggtaacagacttgaacagacaagtctgaaaagtggaaatccaaatggtgaagaaacaaacaaaaagctcaacttcattaataatctgggagataaaatgtaaaccacaataagataccattttgtaccccccagattggaaaaattaagtctgtaataccaagagatgacaaggatgcagatgcctctgggagtataaattggtacagccaatgtggaaagcaactggacttgatctagtcatgttgaagaccatgtcatccagcaattttattcctagataaatatcttagggcaacccatgcatgtgcgcaccaggagacaagaaagctttacaacaacaacatcagtaaggaccaaacactgagaacaactcaaatgtccatcagccataaaatgcattaactgtgagcttgtatgctatatgaaatctcagcagtgaaaatatatacaatgaaactatagctatgtccaccaaatgaagcaaatcatcaaagaatgcatacagtacatttatttccaagtttaaaaatagacgagtaggttaaactatatgaagctgtatgaatttgcagatattcagcatttttctcttacaaatggcatttgtcattcactgtagtactgtttagggtgcatacataaatggtaaaaccataaaggaaagcaaggttcaatcagactttttctgattaacagaaaagtcaggatagtgttacctctaggagaaggaagggagatttgactgaggaaggacctggggtgttgctggtggggaacttcacaggtactagtgatgttctagtctatttatttatctcacgggtggttacaaaaatatttgctttatttatttatttatttacttatttatttatttattttagagacagggtttcactctgttgcctaggctggagtgcagtggcatgatcatggttcactgcagcatccagctcctgggctcaggtgatcctccagtctcaacctcccaagtagctggtaccactggcatgtgccaccatgcccgactaatttttttatgttttgtagagatgggatcttgctatgttgcccaggctggttgtgaaccactgggctcaagtaatcctgctgccttggcctcccaaagtactgggattacaggtgtgagccaccatgcgcagctaatatttgctttagagttctgctttaaactatgcatatgttatatgcattttaaatgattttattttttaaataaaaagaggaaataaaattttacctgccagttctgaactcagggcacaccagccaagcaagagatcagggcacagttgagagttagagagagcaggccacctgctgctgaaggataggggactcaaatcacagatgacctgtagtggtcactccacacacatgatttgtcttgctttgtcttgtttttcccagataacaattgctaatagaattattattccactcagaatgctaaatatggtaaatttatttatccatgacttcacttataatgctatataataaactacttaagtgtgtttccccagcagaggatgagccccctgggggcaagaaatgggacgttttcatgcttgtactaaagcagagtgcctgacactgtagatcctcaattaaaaggtcactgaaaggatggactccagatgactggatggacaggtagatggatggatagacatcttaatggttgcaggtctttgttaaataggggattttattttcagaactagcgaagggattttttaagcctcccatggggaatacagtggtgttataaaagtgctagtgtggtataaacagagagtacagcatatttaatgatttagtgaatgggacaacagattctatgttttgagtgccccattatgtccctgtcctattatgctgctgggatttgtcagccacacagggtgtgccacctccttgcacagctccagggcacctgttctctttgtgttttaggtaaatagtgttcctggagttgtgcagtgggcaagttctgagcccacctttgctggggaggctctgcagcgccaggcacagcgatggacccaggatgtgaggtgagcgtg

SEQ ID NO: 282 - DNA, 4299 bp, Homo sapiens
cgcagagcgcgcacccaagcggccggacctccccgactcccgggccgcccccgtctcgcgccctgcctccctccttcggccttcacctacccgcctccggattggccgctaggaatcccgcccctctaaagccctgcctgctattggtcacgattttataatcaatggataaagtgggaaaaatgtggaataacttcaaatacaggtgtcagaatctcttcggtcatgagggaggaagccgtagtgaaaatgtggacatgaactccaacagatgtttgtctgtcaaagagaaaaacatcagcataggagactcaactcctcagcaacaaagcagtcccttaagagaaaatattgccttacaactgggattaagcccttcgaagaattcttcaaggagaaatcaaaattgtgccacagaaatccctcaaattgttgaaataagcatcgaaaaggataatgattcttgtgttaccccaggaacaagacttgcacgaagagattcctactctcgacatgctccatggggtgggaagaaaaaacattcctgttctacaaagacccagagttcattggatgctgataaaaagtttggtagaactcgaagtggacttcaaaggagagagaggcgctacggcgtaagttctgtacacgacatggacagtgtttccagcagaactgtaggaagtcgctctctaagacagaggttgcaggatactgtgggcttgtgttttcccatgagaacttacagcaagcagtcaaagcctctcttttccaataaaagaaaaatccatctctctgaattaatgcttgagaaatgcccttttcctgctggctcagatttagcccaaaaatggcatttgattaaacagcatacagctcctgtgagcccacattcaacattttttgatacatttgatccatctttggtttctacagaagatgaagaagataggcttagagagagaaggcggcttagtattgaagaaggggttgatccccctcccaatgcacaaatacatacatttgaagctactgcacaggttaatccattatataaactgggaccaaaattagctcctggaatgactgaaataagtggggacagttctgcaattccacaagctaattgtgactcggaagaggatacaaccaccctgtgtttgcagtcacggaggcagaagcagcgtcagatatctggagacagccatacccatgttagcagacagggagcttggaaagtccacacacagattgattacatacactgcctcgtgcctgatttgcttcaaattacagggaatccctgttactggggagtgatggaccgttatgaagcagaagcccttctcgaagggaaacctgaaggcacgtttttgctcagggactctgcgcaagaggactacctcttctctgtgagcttccgccgctacaacagatccctgcatgcccgaattgagcagtggaatcacaactttagtttcgacgcccatgacccgtgtgtatttcactcctccactgtaacgggacttttagaacattataaagatcccagttcgtgcatgttttttgaaccattgcttactatatcactaaataggactttcccttttagcctgcagtatatctgtcgcgcggtaatctgcaggtgcactacgtatgatggaattgatgggctccctctaccctcaatgttacaggattttttaaaagagtatcattataaacaaaaagttagagttcgctggttggaacgagaaccagtcaaggcaaagtaaactctccggtccccaaaggttgttaactaggtccgctttcatgtgcatcagacagtacacctatagcaagcacacgtagcagtgttaggctttttcatacagtatgtaagcttagtgttagtatctgtcagatgctacctgctgttacttattcagataaacatggtgcctattggaacaatagcggatagagctacaggtgttcagtaagactacaaaaacattttgcctatttcgctaacagtttggtttttaatggctgtggtatttgagtgaggcaactctggggcatttgttatgaagaattctatttcttactgaagaacaaattattaatattggatgagtatttcaacagtgtgactaatgtttgaaattattttttctaagagtttttctataaccttccaaaagtcgtgatgtttgtagttactataaatcaagctttggaagtccaaaaagaataaaagactgccttccttttagaaaaaaatgcaattttctggccacaagggcatagtgcagttcacttacgtgttgatgtagtttataatcagacgccttttctcttctgcaaaaggtactgttaagtaaaccagattttctaaataggcattcttaaaatttcagacttacaaagctagtagtagaattttattgaaaggcctaggtattaattttttaaatgagtgctttaacttaaaacaggcgtttggaatagctgctgcaatgtagtcttgtgtgtgatttttttttaagttgatgtgcagtctaattgttgtttcataaaagttggatctgttcctatgcccaggatgattttgtgaaccgtgaagtacgtgagactagaagacgcccaaacaagtcagataatagtaactacaatggttgctgatgttgagattattgttgaactataattaataatttggatggcagaatttatctcttttttgtaaactctcataactgaattgcttaagtataatttatagaatttcagtgcagttcattcttaatggaaaatctgaaacctaaattgcagatttaaaaggtactgtacaaccattatatctgtaaataacttagcacctttttgtcacttagaataatatgtactactacttgagtgagcgcttttggaagttatatcaagttctagtgtttgcttcttagtaactgaactgaatttacagttctgtcctagacattttgcactaaagtagccgaatccactctcatgtcttttcgttaatgtgctctgtaccactggtgagtgctccatagtttccttacctgctgctacagaatgttattttacatccctatggctattgccaaggctacaaaaaaggaaagctatatttgtatgcaacactaaccttttgactgctaatgtatgtttctgcttgctgtgccttgttatggctgctttttttgtgctaataaagtatgtttggtgttctccttgtatatctgctgttttatacatttgcaacaatttctcttgtaaatggaatggtttggggtttttaaataagcattaactaacaacctttctatagttaatgcagagttaatgaacagtctaatattgacttatcagaataagctaactctaaatttaatgctctacatcttatcagtcataattatatatactgtggaacagtatctgtagttactgcaaattactgtacagtttaggttataacagaaaactgacagagaagtaataaacctattgatttctctgcttataaatgaaagattgaaactatccaatgacatattatagtaaatgagtatctgtaacctcccactgcatcagaagcaggttaaatgaagtcttgtgaatttgtaatagatcagtaccatttattggtttggggaccatcttaattaaaaataaatgcccaaaatgtagaactttaaccaaagacttgtcccttttaaagcaaaatggggattgaagggacttataatttctgttgtttctaattaaagtccctgaagatcatataccaaagtgtttgagaacttcatccaaacctactttaaagcattatgtgcaattaagttgttatgacataattatattgcctaattgttgggtcttttttcttgagcttataatgtacctggaaaataaacctcttgagaaaaagaaaagttcatactgattattggaaaaggactatatatgtgagcaagattgtgttttagagaggaaacttgaaactccaagaaagcacttgatgtttttatatgcttgtagcaaattgatgttctaactgtagttttatagaaagtattaatgcttttatgtatttcaaaactttcatatgttaaatggaaattgttttaaatgtgtttgagtttatgtaagcatgtatacactgtgctaaaagtcacatgtttcagtttgtgtataatattaatatgcaatttttggtttaaatttttgtcttaaaatattagtggcttacattttaaaaaagaaaaatcaccagcatgaacttgc

SEQ ID NO: 283 - protein, 536 aa, Homo sapiens
MDKVGKMWNNFKYRCQNLFGHEGGSRSENVDMNSNRCLSVKEKNISIGDSTPQQQSSPLRENIALQLGLSPSKNSSRRNQNCATEIPQIVEISIEKDNDSCVTPGTRLARRDSYSRHAPWGGKKKHSCSTKTQSSLDADKKFGRTRSGLQRRERRYGVSSVHDMDSVSSRTVGSRSLRQRLQDTVGLCFPMRTYSKQSKPLFSNKRKIHLSELMLEKCPFPAGSDLAQKWHLIKQHTAPVSPHSTFFDTFDPSLVSTEDEEDRLRERRRLSIEEGVDPPPNAQIHTFEATAQVNPLYKLGPKLAPGMTEISGDSSAIPQANCDSEEDTTTLCLQSRRQKQRQISGDSHTHVSRQGAWKVHTQIDYIHCLVPDLLQITGNPCYWGVMDRYEAEALLEGKPEGTFLLRDSAQEDYLFSVSFRRYNRSLHARIEQWNHNFSFDAHDPCVFHSSTVTGLLEHYKDPSSCMFFEPLLTISLNRTFPFSLQYICRAVICRCTTYDGIDGLPLPSMLQDFLKEYHYKQKVRVRWLEREPVKAK

SEQ ID NO: 284 - DNA, 672 bp, Homo sapiens
cccgtcctgcctggccgcaggtgccctggatgaggccgccccgcgcgccccaaacggaaatgctcactttcaaccatgagaggaataacaaggagaggtcaacagatgagacacctggctctgcctttcaacttcctgggtgaccaaaagcatgtcactcagcatccctgggctctcttacccatctgtgcgtaattgcttctctccactgcagctgtgactctgtgaacaactctgaagtatgacctctgctcactgcagcctccacccccagggttcaagtgattctcctgcctcagcctcctgagtagctgagattacagcaggtcagcacctagtcttacggtgttgcaagcatacaatggcacaaagttttggatgagcttgttaaatgctgaatacatgaaggagattattattctaagtggcacacgaagaatttattcaacaaagctgtattgatgatttactctctgcatcagctcctgggactgcaagtataaaagtgattcagaccttgcccttgggaagccggggagagactcaaatagctaacagcagggtaaatagtgttcctggagttgtgcagtgggcaagttctgagcccacctttgctggggaggctctgcagcgccaggcacagcgatggacccaggatgtgaggtgagcgtg

SEQ ID NO: 285 - protein, 39 aa, Homo sapiens
MRGITRRGQQMRHLALPFNFLGDQKHVTQHPWALLPICA

SEQ ID NO: 286 - DNA, 4360 bp, Homo sapiens
gaggggggaggggaaacgggtgaagaaggggaggcggcagggaagggggtgggggcctggcgggggcatccggcggagctggggtccccgggctccgtccggaggaagcgacgctgcgctcgctgggcagtcggaggggacgggacgcaccggagggcaggcggactcgccctgtcggtgactgcgccgtccgggcccgtcctgcctggccgcaggtgccctggatgaggccgccccgcgcgccccaaacgattttataatcaatggataaagtgggaaaaatgtggaataacttcaaatacaggtgtcagaatctcttcggtcatgagggaggaagccgtagtgaaaatgtggacatgaactccaacagatgtttgtctgtcaaagagaaaaacatcagcataggagactcaactcctcagcaacaaagcagtcccttaagagaaaatattgccttacaactgggattaagcccttcgaagaattcttcaaggagaaatcaaaattgtgccacagaaatccctcaaattgttgaaataagcatcgaaaaggataatgattcttgtgttaccccaggaacaagacttgcacgaagagattcctactctcgacatgctccatggggtgggaagaaaaaacattcctgttctacaaagacccagagttcattggatgctgataaaaagtttggtagaactcgaagtggacttcaaaggagagagaggcgctacggcgtaagttctgtacacgacatggacagtgtttccagcagaactgtaggaagtcgctctctaagacagaggttgcaggatactgtgggcttgtgttttcccatgagaacttacagcaagcagtcaaagcctctcttttccaataaaagaaaaatccatctctctgaattaatgcttgagaaatgcccttttcctgctggctcagatttagcccaaaaatggcatttgattaaacagcatacagctcctgtgagcccacattcaacattttttgatacatttgatccatctttggtttctacagaagatgaagaagataggcttagagagagaaggcggcttagtattgaagaaggggttgatccccctcccaatgcacaaatacatacatttgaagctactgcacaggttaatccattatataaactgggaccaaaattagctcctggaatgactgaaataagtggggacagttctgcaattccacaagctaattgtgactcggaagaggatacaaccaccctgtgtttgcagtcacggaggcagaagcagcgtcagatatctggagacagccatacccatgttagcagacagggagcttggaaagtccacacacagattgattacatacactgcctcgtgcctgatttgcttcaaattacagggaatccctgttactggggagtgatggaccgttatgaagcagaagcccttctcgaagggaaacctgaaggcacgtttttgctcagggactctgcgcaagaggactacctcttctctgtgagcttccgccgctacaacagatccctgcatgcccgaattgagcagtggaatcacaactttagtttcgacgcccatgacccgtgtgtatttcactcctccactgtaacgggacttttagaacattataaagatcccagttcgtgcatgttttttgaaccattgcttactatatcactaaataggactttcccttttagcctgcagtatatctgtcgcgcggtaatctgcaggtgcactacgtatgatggaattgatgggctccctctaccctcaatgttacaggattttttaaaagagtatcattataaacaaaaagttagagttcgctggttggaacgagaaccagtcaaggcaaagtaaactctccggtccccaaaggttgttaactaggtccgctttcatgtgcatcagacagtacacctatagcaagcacacgtagcagtgttaggctttttcatacagtatgtaagcttagtgttagtatctgtcagatgctacctgctgttacttattcagataaacatggtgcctattggaacaatagcggatagagctacaggtgttcagtaagactacaaaaacattttgcctatttcgctaacagtttggtttttaatggctgtggtatttgagtgaggcaactctggggcatttgttatgaagaattctatttcttactgaagaacaaattattaatattggatgagtatttcaacagtgtgactaatgtttgaaattattttttctaagagtttttctataaccttccaaaagtcgtgatgtttgtagttactataaatcaagctttggaagtccaaaaagaataaaagactgccttccttttagaaaaaaatgcaattttctggccacaagggcatagtgcagttcacttacgtgttgatgtagtttataatcagacgccttttctcttctgcaaaaggtactgttaagtaaaccagattttctaaataggcattcttaaaatttcagacttacaaagctagtagtagaattttattgaaaggcctaggtattaattttttaaatgagtgctttaacttaaaacaggcgtttggaatagctgctgcaatgtagtcttgtgtgtgatttttttttaagttgatgtgcagtctaattgttgtttcataaaagttggatctgttcctatgcccaggatgattttgtgaaccgtgaagtacgtgagactagaagacgcccaaacaagtcagataatagtaactacaatggttgctgatgttgagattattgttgaactataattaataatttggatggcagaatttatctcttttttgtaaactctcataactgaattgcttaagtataatttatagaatttcagtgcagttcattcttaatggaaaatctgaaacctaaattgcagatttaaaaggtactgtacaaccattatatctgtaaataacttagcacctttttgtcacttagaataatatgtactactacttgagtgagcgcttttggaagttatatcaagttctagtgtttgcttcttagtaactgaactgaatttacagttctgtcctagacattttgcactaaagtagccgaatccactctcatgtcttttcgttaatgtgctctgtaccactggtgagtgctccatagtttccttacctgctgctacagaatgttattttacatccctatggctattgccaaggctacaaaaaaggaaagctatatttgtatgcaacactaaccttttgactgctaatgtatgtttctgcttgctgtgccttgttatggctgctttttttgtgctaataaagtatgtttggtgttctccttgtatatctgctgttttatacatttgcaacaatttctcttgtaaatggaatggtttggggtttttaaataagcattaactaacaacctttctatagttaatgcagagttaatgaacagtctaatattgacttatcagaataagctaactctaaatttaatgctctacatcttatcagtcataattatatatactgtggaacagtatctgtagttactgcaaattactgtacagtttaggttataacagaaaactgacagagaagtaataaacctattgatttctctgcttataaatgaaagattgaaactatccaatgacatattatagtaaatgagtatctgtaacctcccactgcatcagaagcaggttaaatgaagtcttgtgaatttgtaatagatcagtaccatttattggtttggggaccatcttaattaaaaataaatgcccaaaatgtagaactttaaccaaagacttgtcccttttaaagcaaaatggggattgaagggacttataatttctgttgtttctaattaaagtccctgaagatcatataccaaagtgtttgagaacttcatccaaacctactttaaagcattatgtgcaattaagttgttatgacataattatattgcctaattgttgggtcttttttcttgagcttataatgtacctggaaaataaacctcttgagaaaaagaaaagttcatactgattattggaaaaggactatatatgtgagcaagattgtgttttagagaggaaacttgaaactccaagaaagcacttgatgtttttatatgcttgtagcaaattgatgttctaactgtagttttatagaaagtattaatgcttttatgtatttcaaaactttcatatgttaaatggaaattgttttaaatgtgtttgagtttatgtaagcatgtatacactgtgctaaaagtcacatgtttcagtttgtgtataatattaatatgcaatttttggtttaaatttttgtcttaaaatattagtggct

SEQ ID NO: 287 - protein, 536 aa, Homo sapiens; identical to SEQ ID NO: 283

SEQ ID NO: 288 - DNA, 20987 bp, Homo sapiens
ctcttcagatttgtctttgactctgactcttctgccttccacttccatcttttaagatcccttttttattatattgggcccacttggataatacagaataatctcccatctcaaaatctttaacttaattacatctgaaaagtctcttttgtgaagtaaggtaatatattcacaggtttcagggattaggacttggccatctttggggccattcttctgcccagccattcttcttaccctagccaggtgggtaaggagggagaaatcaggaggttgttggcaggacctcactggccagaggagggtctgagttaggtcctccaggtgggaagacttttcacaacatggagaggattgcaggcaggctgagcagcacgaacaaaggcacagcagttaccacgagcctggcatgagcacactgggcagtagggagacagtgctaactgaagaaaagaggtgcaccttggagcattatgggaagtaatgctgtggaaaagttgggttccattcttcttcaactacgagacttggagggtagtgcctcctttttcacaagcaacatgttagtataatttgtggatcttctttgctgaaaattaggaatggattaactaagattctataacaaagcttttttttctgattagcatttttctgtcttttctgattcctttaacctgattccctttttcgctgttatttgttgttattgctttgctttttctaaatgagttctagctttgtagtagacaaaggggtactttgtgtcagtaccctgacatacccctcccctgcttcgcaccccttttccttctaactgccagcatttcacctaacatctttctctaaccccaaagcttgctttgcatatctgccaagtggaaaaaatctgattcacactccctcacttttcagcagctgtcttccaacgactgaggagttggtctataaatcccatttcccttcttcccctccagtgggataactctgaaacatgactcctacgctggctccccgagttactcagcaacttaagctcctgttgcctatagtggtaacttaattgacactgaacccgatgctggctccttcccttccctgtctcacttctccactcctctacaggtgtttgttaggatcacctcccagataaactacttgcacttgaatccatgtcacagggggacatgaatcatgtctctagggcaacccaaactaaaataggatttcatcaacatagtgagtgcttttaactagtcggggttaaagttataaaagtgactttgtgggctctttcagagaactttgcctacagtaaagtcctgattttaggagaagctgatttttaaagtgtataaaaggaccagcccacagaaaaaaatgcaaaagctcaggaaaacatcaacagtaaaaataaccccagtggaccttggcaagaggcagtgatagaaaacaatgtgaaagttttctgccatcatagagctgactggtacagtcaaatgacatgaccaaaaacaaatctctgacacccaatttccattctgggcccaaactccatgctgacttccaaagttacatgtttaagtaaacctaaattgtgaaataaaaacaaagaaaaagaactcttatttaactgattacctaaaatacaaaattttaaataacactgtgagaatatattttttattgaatatctcaaagtaagttaattgctacttacactggatgctaaccatattaaaatatttagttgctgaggtatgactggaattcatgtttccaaaggattaattaagcaaaacaacagattaatttaagggcaggctatacccagtggtggagagtttgaaattaacatacagattaagagtgaccattaaaactaaagaaccactgcagctcccagcgtgatcgacgcagaagacgggtgattcctgcatttccaactgaagtacctggttcatctcacagggcctggttggacagtgggtgcaccctgcagagagcgagctgaagcagggtggggcatcacctcacccaggaagtgcaaggggttgggggatttccctttcctagccaagggaagccatgacagactgtacctgggaaaaggggacactcccacctacatactgcacttttcccatggtctgagcaaccggcagaccaggagattctctctcatgcctggcttagtgggtcccatacccacagagccttgctcactgctagtgcagcagtctgagatcgacctgcaatgctgcagcctggctgggggaggggcatctgtattgctgaggcttgagtaggtaaacaaaacagccaggaagctcaaactgggaggggcccaccgcagctcagtaaggcctactgtctctacagactccacctctgtgggcaaggcatagctgaacaaaaggcagcagaaacttctgcagacttaaacgtccctgtctgatagctctgaagagagcagtggttctcctagcatggtgttttgagcactgagaacggacagactgcctcctcaagtgggttcctgacccccatgaagcctaactgggagacacctcccagtaggggctgacagacacctcacacaggcgggtgcccctctgggatgaagcttccagaggaaggatcaggcagcaatatttgctgttctgcagcctccgctggtgatacccagaaaaacagggtctggagtggacctacagcaaactccaacagacctgaagctgagggacctgactgttacaaggaaagctaacaaacagaaaggcatagcatcaacctcaacaaaaaaagacatctacaccaaaaccccatcatagaccaaaggtagataaaaccacaagatggggagaaaccagagcagaaaagctgaaaattctaaaaaccagagcgcctcttctcctccaaaggatcgcagctcctcaccagcaacagaacaaagctggacttagacgagttgacagaagtaggcttcagaagatcagtaataacaaacttctccaagctaaaggagcatgttctaacccatcacgaggaagttaaaaaccttgaaaaaaggttagatgaatgactaactaaacagtgtagagaagaccttaaatgacctaagggagcttaaaaccatggcatgagaacttcatgacgcatgcacaagcttcaatagccaatttgatcaagtggaagaagggtatcagtgattaaagatcaaattaatgaaataaagcaagaagacaagtttagagaaaaaagtaaaaagtaacaaagcctccaagaaatacaggactacgtgaaaagactaaatctacgtttgactagtatacctgaaagtgacaggaagaatggaacaaagttggaaaacactcttcaggatattatccaggagaacgtccccaacctagcaaggcaggccaacatacaaattcaggaaatataaagaacaccacaaagatagtcctcgacaagaccaaccccaagacacacaattgtcagattcgccaaggttgaaatgcaggaaaaaaatgttaagggcagccagagagaaaggtcgggttacccacaaagagaagcccatcagacaaacagtggatctctcagcagaaaccctaaaagccagaagagagtgggggccaatatttaaatttcttaaagaaaagaattttcaacccagaatttcatatccagccaaactaagcttcataagcgaaggagaaataaaatcttttacagacaagcaaatgtggagagattctgtgggcctgccttacaagagttcctgaaggaaacactaaacatggaaaggaacaaccagcaccagccactgcaaaaacatgccaaattgtaaagaccatcgatgctatgaagaaactgcatcaattaatgggcaaaataaccagctaacatcataatgacaggatcaaattcacacataacaatattaaccttaaatgtaaatgggttaaatgccccaattaaaagacacagactggcaaactggataaagagtcaagacccatcagtgtgctgtattcaggagacccatctcacatgcagagacacatatcggctcaaagtaaagggatggaggaagatctaccaagcaaacggcaagcaaaaaaagagcagggattgcaatcctagtctctgataaaacagactttaaaacaacaaagatcaaaagagacaaaagaaggccattacataatggtaaagggatcaattcaacaagaagagctaactatcctaaatatatatggacccaacagaggagcacccagattcataaagcaagtccttagagacctacaaagagacttagactccaacacaataataatgggagactttaacaccccactctcaatatcagaacaagacagagggttaacaaggatgtccaggacttgaactcaactctgcactaagcgaaattaacagacatctacagaactctccaccccaaatcaacagaatatacattcttctcagcaccacatcacacttattctaaaattgaccacataattggaagtaaagcactcctcagcaaatgtaaaagaacagaaatcacaacaaactctcagatcacagtgcaatcaaattagaactcaggattaagaaactcactcaaaaccacacaagtacatggaaactgaacaacctgttcctgaatgactactgggtaaataatgaaatgaaggcagaaataaagatgttcttagaaaccaatgaaaacaacgacacaatgtaccagaatctctgggacacatttaaagcagtgtgcagtgggaaaattatagcactaaaggctcacaagagaaatctggaaagatctaaaatcaataccctaatatcacaattaaaataactagaaaaccaagagcaaacaaatacaaaagctagcagaaggcaagaaattcctctatgcaaataaactagaaaatctagaagaaatggataaattccttgacacatacaccctcccaagactaaacgaggaagaagttgaatctctgaatagaccagtaacaagctctgaaattgaggcaataattaacagcctaccaaccaaaaaaagtccaggaccagacagattcacagctgaattctaccagaggtacaaagaagagctggtaccattccttctgaaactattccaatcaatagaaaaagagggcatcctccctaactcattttatgaggccagcatcatgcagataccaaagcccggcagagacactacaaaaaaaagaaaattttggaacaatatctttaatgaacatcgatgcaaaaatcctcaataaaatactggcaaaccaaatccagcagcacatcaaaaagcttatccaccatgatcaagtgggcttcatctctgggatgcaaggctggttcaacatatgcaaatcaataaacgtaatccatcacataaactgaaccaactacaaaaaccacatgattatctcaaaagatgcagaaaaggcctttgacaaaattcaacaggacttaatgcttaaaaactctcaaactagggattgatggaatctatctcaaaataataaaagctatttatcacaaacccacagccaatatcatactaaatgggcaaaaactggaagcatttcctttgaaaaccggcacaagacaaggataccccctctcaccactcctgttcaacatagtgttggaagttctggccagggcaatcaggcaagagaaagaaagaaacggtattcaattaggaaaagaggaagtcaaattgtccctgtttgcagatgacatgaatgtatatttagaaaactcccatcatctcagcccaaaatctccttaagctgataagcaacttcagcaaagtctcaggatacaaaatcaatgtgcaaaaatcacaagcattcctatacaccgataacagacaaagagagagccaaatcatgagtgaacttccattcacaattgcttcaaagagaataaaatacctaggaatccaacttacaggggatgtgaaggacctcttcaaggagaactacaaaccactgctcaatgaaataagaggacacaaatgaatagaagaacatttcatgcttgtggataggaagaatcaatatcatgaaaatggccatactgcccaaggtaatttatagattcaataccattcccatcaagctaccaaggactgtcttcacagaattggaaaaaactacttgaaagtccatatggaaccaaaaaagagcccgcattgccaagacaatcctaagcaaaaagaacaaagctggaggcatcacgttacctgacttcaaactatactatgaggctacagtaaccaaaatagcatgctactggtaccaaaacagagatatagaccaatggaacagaacagaggccccagaaataataccacacatctacaaccatctgatctttgacaaacctgaaaaaaacaagaaatggggaaaggattccctatttaataaatggtgctgggaaaactggctagccatatgtagaaagctgaaactggatcctttccttacaccttatacaaaaattaattcaagatggattaaagacttaaatgttagacctaaaaccataaaacccctagaagaaaacctaggcaataccattcaggacataagcatgggcaaggacttcatgactaaaacaccaaaagcaatggcaacaaaagccaaaagagacaaatgagatctaattaaactaaagagcttctgcacagcaaaagaaactaccgtcagagtgaacaggcaacctacagaatgggagaaaatttttgcaatctacccatctgacaaagggctaatatccagaatctacaaagaacttaaaacaaatttacaagaaaaaaacaaccccatcaaaaagtgggagaaggatatgaacagacatttctcaaaagaagacatttatgcagccaacggacacatgaaaaaatgctcatcatcactggccatcagagaaatgcaaatcacaaccacaatgagataccatctcatgccagttagaatggcgatcattaaaaagtcaggaaacaacagatgttggagaggttgtggagaaataggaacgcttttacactgttggtgggagtgtaaattagttcaaccattgtggaagactgtggcgattcctcaaggatctagaactagaaataccacttgacccagtgatcccacaaaggattataaatcatgctactataaagacacatgcacacgtatgtttattgtggcactattcacaatagcagacttggaaccaacccaaatgtccatcaatgatagactgtattaagaaattgtggcacatatacaccggggagtagggggtggggggagggatagcattaggagaaatacctaatgtaaatgaggagttgatgggtgcagcaaaccaacatggcacatgcatacctatttaacaaacctgcaaattgtgcacatgtaccctagaacttaaagtataacaaaataaaaaataaataaataaaaaaactaaagaaccaaaaggagccaatttttttttctttttgcagctagtaagttaaaaaatctcaatatgcttttcacgtttttgacttacttttctttgaagggctaaatatgtggatgattccaaagtcaaaaatattttaaaaacatattctgtctgggtatggtgtctcacacctataatcccagcactttgggagactgaggagggtggatttcttgagtccaggagtttgagaccagcctggacaacatggcaaaaccccatctctacaaaaattagccaggcgtggtggtgtgcacctgtagtcctagctacttgggaggctgaagtaggaggatggcttgaggccaggaggcagatgctgcagagactgtgccactgccctcactctagcctgggtgacagagccagaccctgtctcgaaaaaatatataaataaaataaaatgaaaattcaaagtctcacttctaatccctttcctctgccgaaaaggtaactatatttgcttttgatttattcttccagtgtttcttttcaaaattatatgaaaacatttagattatatgcatgtctcttcttcttatataaaaggtagcagtgcttttatatagtttatgctataaacctatatatcatgtgctacatattaagtgctatcttgttttcttaataatattcttgaaaatcataccacattaccacataaagatcatctttattctcctttttaaggttgcacagaactgctttactgatgatgtaatattacaaaatacatatttggtctttgacccatttcctgatatacagctcttaaaatccttggactctctaaagtgatgtctttctaatgagttgactgatggctggcagcctgtaggtagcttcaggatgtgggctggtcatgcagaaagatcaaggcatgattagaaagatccagatagggagagcggctgaaggttaagttgatcaccaatggccaattaatcaatcatgcctatgtaatgaagcctccataaaaacccaaaaggacagggtttgggaagcttccagatagctgaagacatgaagtttcctggagtgtggctcacctagaaatgacatggaagctctatccttcccccatacctcaccccatgcatctcttcctctgtatcctttgttatgtcctttataatacgctagtaaacatgcttccctgagttctgtgagctgctttagtaaattaatcgaatccaaggagggggttgtgggatccccagtttatagccggtcagtcagaagcacaggcaaactaacctggggtttgcaaatggcatcagaagtgggatccctcaacctgtgagatctcacactgtctccaggcagtgtcagaattgaactgaattagaggatactcagctactgtctgctggagaactgattgtgtgaaaataagtaattcaaaatctaagctgttggaacttcaaaacattttgagccttaaaggaatgtgattataggacctcagtcacgtaacagggaactgtaaccactgtttctctgattagatttgccttctctcttacccacatagttttataaaatgttgtaaatgattaaagggcacctaggcagccccattctctcttcactgtagattaactgcccttttacttttttcatacacagactatcatgtctaagatgaaatgttaaaaacactcttttaaattgaaaaggaaatgaaagcaagctgtaactcattagattgttataactcataaaccagccttgcatagaaaatgctataaccctaatacatttgttttctgcctgtataagcaagaacttaacttttaatttgggagcacagactccatttctctggagtttgtgtttcccagatggccattctcagcttttcacttgaataaagctagactctgattctttcgattatttcaggttaacacttgcttggtgtctggggaaaaaaccccacacatttcacagaagtctactgtgttgattgttgctgggtgagagaacagaaaaagcactttgagtgttttttccatagagatggccatttgtgttctttccaatcttttgctattacaaataaaggcacaaagaatgactttacagatatgttcttttatattttttgcaaatttgcctttgggatatattcccaaaagtgtgattgcttaattaaaggtatatgcatatttaattttgctagacattgcccaattcctctgagttaatactattctcattcctatcagcaaagtatgagagtacctattttacccatagccttgccaaaagattatgcaaacctttggacatttatctactgatgggtaagaagtggtgtctcaatgcagttttaatttctatttcttccttatacgttgagctaaactactcttctaaaagttgtttgtgcttcctgccagaggatgccgtcaaggaggcattgttaaaatctctcttcccactgccgtcacgtcgcagtcagttttctaaagagcccgaatggctgtggaagctcttcattttcattggagggttggctttgaaacaaagctgaggaagatctgaggagccattccgagcaatggggaacactcacagagtgtgtggtaatgggagatccaaacaccaggcactccaggggccttgggtttgtcacgtatgccactccaggggctttgggtttgtcacgtatgccactgtggaggaggtagatgcagtcatgaatgcaaagctacacaaggtggatggaagagttgtggaaccaaagagagctgtctcaagagaagactctcagagaccagtgcccacttaactgtgaaaaagatatttgttgctggcattaaagagtatactgaagaacatcacctaagagattattttaaacagtatggaaaaactgaagtgattgaaatcatgactgaccaaggcaatggcaagaaaaaaggctttgcctttgtaagcatgactgtggataagactgtcattctgaaataccatactgtgaatggccacaattgtgaaattagggaagctgtgtcaaatcaagagatgcctagtgcttcatctagccgaaaagggtgaagtgcttctggaaactttggtggtggttgtggaggtggttttggtgggaatggcaattttggttgtggtggaaactttagtggtcatggtggctttggtggtagctctggtggtggtggatatggtggcagtgggatggttaaaatggattttgtaataatggaagcaaatttggaggtgctgaaagctacaatgatcttggcaattacaacagtcttcaaattctgaacccatgaaggaaggaaactttggtggcagaagatctggcccctatggtggtggaggcaaattcttttctaaactatgaaaccaaggtggctgtggcagttccaatagctgcagaagctatggcagtagcagattttaattactgctaggaaataaagtttagcaggagagaagagccagagaagtgacagggaaactacaggttacaacggatttgtgaattcagccaagcacagtggtggcagggcctagctgctacaaagaagacatgttttagacagtatttgtgtatatgggcaaaaaacatgaaaactatatttgtgattaattatgtaacaattaataacaggttatcttagtttatgttctgtggaaagtgtaaaacagtccactgaagggttttaatataagattttattttttgcatccatgctgttgattgctaaatgttatagtccgatcatgacactgaatgtgtctttaaaaataaattaattaatcacattaaatttgtatttcttttcctgtaacttaaataaacttatacttttacccagttttctatcaggaagttagtctcttaattaaattacatttttatttttagaagctctctttatattagaaatgttagtccttcatgatctaagtggccaatacttactctaatttattgtgtcttgtgactttccttatgatgctttcttcttatgccaaaattcttctttttaaaaatgtagcttaattcattaatcttttctcttactgattttctagttttgagccacagctaccccttaatattctcatgctaccgtaaatatttcagccatgccttcttttaatactagcatggtttcatgttttacttttaaaacactaacccatttgaaatgtttccgggtatatagtataacatagagctctaaatttatctttttccaaatggctatccagtttttagggaagccatcttttttccactgatttgaggtgctgtctttatcattagtaagccactatatatatataaacccatctctggacctcctaatctgctccattagtcttcttgctctttcaggtatctcattatgttcattacaaaggctttatattttacatcttcttttccaggatttacttggctattcctcctgtttgttttttccttataaactttaaaatcaatttttactacttcctcctcagaataaaaggacctactggtatttttatttgaatattttaaaacttttataaataaacacaaaaagcattgacatgttgctgttttttttttttttagacggagtctcactctgttgcccaggctggagtgcagtggcacgatctcagctcactgcaagctccacctcctgggttcatgccattctcctgcctcagcctctcaagtagctgggactacaggtgcccaccaccatgcccagctaattttttgtatttttttttttttttttaagtagagacagggtttcactgtgttagccaggttggtctcgatctcctgacctcgtgatctgcccaccctggcctcccaaagtgctgggattacaggcgagagccaccgcgcccggccagctgattcttcaaaaatgtcatagttgacaaaaaaggctctgttcgagtcgacttctgtgttttttaaagggtttaaattccttgtgtaaattttactcatttaacctctacgttatctttgttgttgctactgaagaggtgtcttctctttaattacatcattcagttggaatttgtttatatatataaagaacattgatttttgcatatcaatcttatatctgtaactttgctaaattgtctgtcatagttttcccatcaactttcacgggctttacagacatataattatacacttggcattaaaaaaaccattgctccaatttctaagtctcaaatactttctcttgtttaatgttactggctaatgatcactaatactatgttaaatagcagaggcaacagagagaatccttgtctagttccctattttggtagtaatgcctctagtgttacaccttaagaaagggatttagactttagggctgtgatgcatgtaatttatcatgttaaggaattatctattgatttacacatggccataaacatgggaacaacagactctgcagactactagagagaggagggagtgggggatgggctgaaaaactacctattgggtactatactctctctacctgggtgcaatatacccatgtaacaatcctgcacatgtaccccttctatctaaaataaaagctgaaattgagagacagagacattattccaggtaagcctgatttaatcagatgcaaagcccttaacagatagactggagctctccctgagatcagatgctctcttgctgaccttggaaaggtaagctgctatgtgttacacagctataatgaaacaaattctgccaacagccatataagcttgcaagatggtcctgagcctcagatgaaactatggccccaaccaacacttcagttgcagtcctgtgagaccctgaacagaggagacaactaagctgtgcccagactcttgatcacagaaactgtgagataataaatgagcattgttttaagctggaaaaattgtggcaatgtgttatgcagcaacagaaaactaatacacatggcaattcttcagtctagtaaaaagaaacaagtaagtttaacgaagtgtgatagatgttagaaatgcttaggggacaaaataaaaaaacagttaattctatatagtagtttacaacaggcttcacaaaggagatgccccttgagatgaattttataagaggtattcaaaaggtagacattagctacctatcaaaatcccagtgacatttttttctagaaatagaaaaatctatcttaaaattcctatgggatctcaagaaacccataatagtcaaaacaatcttgaaaaagaacaaggttgcaggtctcacacttcctaatttcaagttactacaaagcaataaaaacagtgtggcactgacataaaaacagacatatagaccactgggatagaacagacagcccagaaataaactctgacatacatggttaaatggttttcaacatagatgccaaggcaattcaatggggaaaggacagacttctcaataactggtgatgggaaaactggatttttacatgcaaaagaaggaagctggacccttacctcacaccatatataaaaattaactcagaataaaatgtaagacctaaaactataaaactcttagaagaaaacataggagaaagcttcatgacattggtttggttgatttctcagatatgacaccaaaagcttaggaaacaaaagaaaaaacatgaaaattaaggcaaatcatggaaaaagagaaaatatctgcatattatacatctgataaagagttaatatccagaatatataaagaacacccacaattcaacaacaacaaacaatttaaaaatggacaaagtatttgaatagacattttcccaaagatatacaaaatggccaataagtacaagaaaaaatgttcaacatcagtaatcattagggaaatgcaaatcaaaacaataagaccacttgatacgcattacgttaatgggttttctggtagataaaaacagaaacaaaaaacaaaaataaaaacaaaaacaaaacaaaacagaaaataacaagttttggaaagcatgtggagaaattacaacccttctgcattgtaggtgaaaatgtaaactggtgtggcagctatggaaaagagcatggcagtttctcaaaaaattaaaaacagaattaccatatgatccagcaattccacttccaagtaaatactcagatgtttaaataaataattcaaaacctcccacagatgttttgaattattgacacaaatttgcaattgagcagtttcttacatgggtacatagtatgtctgcaggtagtaatagcagatttttatttacttttaacattgatttatttcttaggaatactgagaaggtaaataaataataagaacatgtaaaatgctaagcaaaaatgaagagctacacaggcattcctacatgcatagatatagatatagatacagataatctatgtgtatgagtatgagtaaatatactaaatctatgtgtataagtaaatattcagaagtggaatcattcagtcttaaaaagaaagggtattctgacatatactacaaagtgaatgaaacttgaggacattattgtaagtgaaataaactagtcacaaaaggccaaatattgtatgactctacttttataaggtaccacttatatatttcacaacttcatagagacagaaaaaatagtggttgctaggggctgaggtgcagggtgaattgggagttattgcttaatggttacagaatttcagttctgcaacatgaaaagagttctgtggatggatggcagtgatggcagcacaacaatgtgactgtacttaatgccactgaactgtatacttaacagtgattaagatggtaaattttatattatgcttatcacaattattttgaaaaggtagacattagtaggcaagattttctaaggaaaagatacttgatgagcagagatacagaggtataagctaacttaacatgctctaaaaagtgcaaacaatttggtaccactgagacttagggcaggagtcttcaaattaagagtacatataggagtgtgtactacatttcacaattctggtgacattaatcacaaaaaaatacccttggggatacccatatactttctgaaagatgtttagaatagttataagagaataaaatatcagatcctccacttccataggtactcattccaaaactgaccagacaccagactgagacaattggtctagtaaattagtaagttctctattgctcccctcccatttcacaattaccacttcagccgcttgacaaaagaaaagcatgtaattcacccatagaaaatactactatggtaaactgtgccagagtttgaaaatcactggagtagaaaaaaaaaaaagaaaaatgaaaagaagacaatttaaaatattggtatctggtaagcctttaataaaaccctttgtctctgctcataaacctgaggtatagttttatggcttctctgttttatgtaattcctattaagggcaaagagtggtattaggaacaaggtattctggcccatatattaggaacgttctgagttcagacatattgtaaagtgggatgactaaagtaatgataggtttagtaataatccctcttctattgtcccccagatactgacaaagaatatgtcactcctgagagaagtcccaagaaacctttgtcaaacaatagtaaaaacccgtatctctttaatgtcatttatttacacaatatacagaccttaaaataaagctattaattttttttagaggaaagctgggagtattggttaaaaaacagtaaacagcttgaacaattccaagccatcatcaaagttggctttaaaaacctcatataaagtattgtcactcactatgatagttaagaaatcacatttgatagtgattattccagtgcataggtgatagccaaaaataagttagtcaccaagtctatcactatagctccattccctattccaaaaccactctgcttcataaaatgcataaaatggcagaagacacacttcaccagattgtagcaaaaatcgtaaaaagaactagttttggtttctgaaaagtttaaactgacttgcataaagcactggatgtaactattagaaacatactagaattcatgcctataaaaagtactatgtgaggaacccaggttttgatgcagtcaaaagacggttgtcatttgtgtaactgaaaaatgaagcaagactttctctgacagaaagaactttctctgaaagtatgatttgactgattgggttgacaatgaaggctagttctgacaattaggttatatagagggtatttctaaaaataaatgagctaaatttgtagtgggaaggctttgattagcatatattaaacacaaatagtttgaagcttcaaatatgagctaaaaatagaaaatcatggcactgaatttttttttctttttgtgggacagagtcttggtctgtcacccaggctggagtgcagtggcagtggcgtgatcacgactcactgcagcctcgacttcccaagctcaagcgatcttcccacagatgttctgaattattgacaaaaacttgcaattgagcagtttcttacatgggtacatagtatgtctgtaggtagtaatagcagatttttatttgcttttaacattgatttatttctcagcaatactgagaaggtaaacaaattacaagaacatgtaaaatgctaagcaaaaatgaagagctacacaagcattcctacatacatttatatatataaatatatatatatataggtattgatatagatacagataatctatgtgtatcctcactagatgtgttctgcttcttccatttacacaaagagatagtttaaatagtttcttaggaaaatattatatttccacaccttaagaagatgtaacctctgacttccttattctttttaccataatatgaaaatatctaagcagtttatctggataatagagcaaagaaaagatgagagtcctatattcttatagttcataacctaaatggccccttattgccttctctaagtgtgcaatatttaatttctactttctagtaatctctgttctcaggtcctgataacttcctgtctctatatccttgaagtaggccatattctgagaattcttattttccattattagccttggcttttaacatgctaaaggtatcatgtgtaaacactccatgaagtggtacttatttgtacaaccatgaaaattagaataaagtcaaaaatccacacttgagaaaacagaggggtccagaaacttgagtgtcacaaagccagaactacaagtcaagcctgctgaatctcaatctaggtcaccaaaattccacaaatattactgtgcaccaagcacaatgatatgatacagagctgaacaagactcagtcctatgctcatgtactggtatgtacacgtatgtatatagagatacactatgccaccatttatgaaaacaataacttgacaaatttaaaggtaaaaacaaacagtttagaaatggaagaaaaggcttcatggaagaaacagtattagaactgaaccttaaagaattgttaggacatgcctccagcaaagacttggaaccaacccaaaggtccaacaatgatagactggattaagaaaatgtggtacatatacaccatggaatactatgcagccataaaaaaggatgagttcatgtcctttgtagggacatggatgaagctggaaaccaccattctcaacaaactatcgcaaggacaaaaaaccaaacaccgcatgttctcactcataggtggggactgaacaatgagaacacttggacacaggaaggggaacatcacacactggggcctgtagtagagtggggggagtggggagggatagcattaggagatatacctaatgtaaatgacaagttaatgggtgcagcacaccaacatggcacatgtacacatatgtaacaaacctgcatgttgtgcacatgtaccctagaacttaaagtataataaaaaaaattaaaaaaaaaattgttaggacaatgatgggaatcatgaggaagaaaggcatcaagataagaatactatgagcaaaggtacaggggcagcaaagtatagagagtatcttccataaataacaagtgataaagctaaaaaaaattgtggtggccaggcacggtggctcacacctgtaatcccagcactttgggaggctgaggcaggcagatcacgaggtcaggagatcaagaccatcctggccaacatggtgaaaccccatctctactaaaaatacaaaaattagctgggtgtgatggtgcacgcctgtaatcccagctactcgggaggctgaggcaggagaatcccctgaaccagggaggcagagcttgcagtgagccgagattgcgccacagcactctagcctggcgacagagcgagactccgtctcaaaaaaaaaaaaaaaagaaaaaagaaaaagagtggtataatatatacaaactgctatggaaaataactggctggaagggaggttggggcagatgacagagctctttaaccataagatttattctgtaaacagaggtaagacatcaacaattttagaagagggggcccttgattaaattaccatctatactgtaccttgttcatttttatagtctagctctgtattgtttttatttgtgtataggtttctctctctcatattacttggtgagatctttgtattccacttctctagaacactctaacacactcccagtaagtttccttaaatgaacctacacaaaccaagcaatcccatatcaaacaatgataaggcataaataaaaaggaaaaagtgttggcttgatttttaatcacagacctacacatatataccatcattagattttaaattactaacgtatatatctagttatattataccactcacatttctatttttcatgctttgtaatagaaatatcagttgcaaaccacaaagaggccatattaagcagtttcctatttatttatttatttttgagacagagtcttgctctgtcacgcaggctgaagtgcagtggcgcaatctcggctcactgcaacctccacctcccaggttcaagcgattctcctgcctcagcctcccaagtagctgggattacagatgtgtgccaccacacctggctaatttttgtatttttagtagagatggggtttcaccatgttggccaggttggtctcaaactcgtgacctcaggtgatctacccgcctcggcctcccaaagtgctgggattacaggcatgagcaaccgtgcccagccattaagcagttttttatgggactaaccgttctaaaacttttgtggaaaaggaataacactctgatttttaaatttctcccttcattttagcttttatactccaataaagtcaatgatgaaacatacaacatttcttagaaaaactacagttcaaatatagcaacaacaaaaatggtagggttagattaaaagcagaaatagcacactctggtgtttgtacacagctcttcttatttgactttttgaggagtttttggctttagggtaaaggaaaaaataatacagtatgtttgatgtttaaaagaaaccaaatacatttcaacaatgaattcctgaataactctgattggaagatggtatctcagaacactttaactccaatttacaaatccagtttacaaatagactcctaatttacaaattggtagtattttaaggtatttttaagttggctgtttaaaaatcaccgatttcccacaagaaacaatgcaaaaagcagttaggttttacagtgaatattttaataagagcacagtactaaactctggtactaaattctggtaactgaacagtaaaaattaaaaaaaaatactcagtgagtttcaaataagagcatggaaaataaaatccagtaagcaatcctagtaaccaaaaaccctgctccctcttcattggccaggagataaccttatctctaatactagcagttacaaccttttggaggcattgacagttaaggcatatttacgaattgtgcatgtgtgtgtttatgtgtgtagtaatgtaatggcagagagaggaaatgagtggagattttgcttaagtcaggaatttttaaaatatacttaatggcagtttattggtagttgtactgaattaatacctgatactgtatcctcagatcctaagaaagtgttgaggacaaagcagatgtttcaataaaaactaccgaatttttgctgaatgatattcttacataattaggttcttaagttcaaaattctgtttaccattactatgctcactgtgttctttccagtattataaaaccctctgccagcctttaactagggttcctcatctgaaccaatgaacacagaaaatgatttta

SEQ ID NO: 289 - DNA, 964 bp, Homo sapiens
ttcccactgccgtcacgtcgcagtcagttttctaaagagcccgaatggctgtggaagctcttcattttcattggagggttggctttgaaacaaagctgaggaagatctgaggagccattccgagcaatggggaacactcacagagtgtgtggtaatgggagatccaaacaccaggcactccaggggccttgggggctttgggtttgtcacgtatgccactgtggaggaggtagatgcagtcatgaatgcaaagctacacaaggtggatggaagagttgtggaaccaaagagagctgtctcaagagaagactctcagagaccagtgcccacttaactgtgaaaaagatatttgttgctggcattaaagagtatactgaagaacatcacctaagagattattttaaacagtatggaaaaactgaagtgattgaaatcatgactgaccaaggcaatggcaagaaaaaaggctttgcctttgtaagcatgactgtggataagactgtcattctgaaataccatactgtgaatggccacaattgtgaaattagggaagctgtgtcaaatcaagagatgcctagtgcttcatctagccgaaaagggtgaagtgcttctggaaactttggtggtggttgtggaggtggttttggtgggaatggcaattttggttgtggtggaaactttagtggtcatggtggctttggtggtagctctggtggtggtggatatggtggcagtgggatggttaaaatggattttgtaataatggaagcaaatttggaggtgctgaaagctacaatgatcttggcaattacaacagtcttcaaattctgaacccatgaaggaaggaaactttggtggcagaagatctggcccctatggtggtggaggcaaattcttttctaaactatgaaaccaaggtggctgtggcagttccaatagctgcagaagctatggcagtagcaga

SEQ ID NO: 290 - protein, 156 aa, Homo sapiens
MGNTVCGNGRSKHQALQGPWGLWVCHVCHCGGGRCSHECKATQGGWKSCGTKESCLKRRLSETSAHLTVKKIFVAGIKEYTEEHHLRDYFKQYGKTEVIEIMTDQGNGKKKGFAFVSMTVDKTVILKYHTVNGHNCEIREAVSNQEMPSASSSRKG

SEQ ID NO: 291 - DNA, 12494 bp, Mus musculus
ctggggaatcgaaactgaaactttgcctctcgggtctttagggcagggctcgcctttgctcttccctgtctgtgcagcgcccctgagccccaaacgagccagacgcggatagccatggcttccagtcccgacccgccgtccccgctactcgtacggctgcgggagtccatccccaaggcgcacaggaagctcgagatatacttccagagccgggcctcgggaggtggggagtgctctgtccagcccgtgggccccagcgccccggacacctacgaggtgaagttcctaaaaaaagcaggtgagccggggcaggggaaacagggcaaggctcgggtgcaagggtagaaccagcaggtttccaaaccgatccctgcatgcttccgacgagagcccacgcgagtgtggctctctgtctgtgggagagtgcggtccacagactccctccatcccacagtggcggagagagcctcgtatgagtccagccgctgatgaggtcgcggttcgactccatctgagaatttcccagcagacccagttgagagaagaaacaaagtgtgggggttgggattgaggaggaaatccagaaccttgtgcacgctaggcaagtgctccaccaccgatctcgactccaagccattttaatgttgtaaataaagattccgttgacttatttttaaggactacaaaagtaatatatgactttaaagaggaaagtcaaagaaaaattatctgaagatagtttggtggggtttggtttggttttggtttttgtttttggtgtgtgtgtgtgtgtgtgtgtgtgtgtgtgtgtgtgtgtgtgtgtgtgtttggttgattttagagacagggttattccttgtatccttgtctgtcctggaactagctccataggctgacctcaaactcgcagagatcctccttcctctactgggattaaaggcaggtggtgccacactaatgtcctcaatgggggcattttcatgcattcttttctgagagtcagcaaatgaatatacattctaaactttttgatcttgtttcttttggggggccgggggtttcaccatttaactatacaataaccattattcaatgtcattgaaatgagagattcaaaaccattacaaaacataggtttccccaccaccacccctttgagacaggatcttgccatgtgccattggttggccttgaactcataatacccctacccctaccactaccatttaagtgctagattgtgagtgtgtaccagcatgcccagactagaaatgtgatttctaataaccaaattatattcctatgctaaaacttaagctcccttctttagagttctgattagcttctcctatcaccagcctgctattccagaatgccagaaataactgttcaggtcctctgtatgcatttgaccaggagcctacaacagataccaccaagggccaacttggtgaaccaatgcattacttattgcattggtattggttattggatttacttacaggaatatgggaaacgactcaaaggcaactgcatcaccaaagcccacctagcatgggtgacagctcacaaagctgggaacctggagctcactgcacacctacaggcagctcaataggttagggagtgttctttccaggtggctcagttggtctaaacttcctcctaagtggagcttagagttcacttcctgcaggcagcttctctggtggtttaagttttcttcacagcttgttttgtctaagagtctcctatgcagacctttaatgagtcctcacagcagctctgttctgggagtctcaggaggactcttcccaacagtctctattgtttattcattcagggaggggcctatgagtctggtcagtttctgggatttcctgaagctattttgagttgtttaccttcttgcttaaggaacttctttgcagggtggaatgtttcagtcttgagaaaatttacacaacagtcccataccctatggtttattcaaataaagtctatggaaggcgaaccaatgcatttatagtagtggcacatgcctttaattgtagcactctggaggcaggggcaggcagatctctgtgagttcaaggccaccctggtctacaccaggagtttcaggacagccaggactacctaaggtctcaaaaacaaaaaataaaacaaaacaaaaaaatgaacaactaaaaagcatatgtgagaacatgggtagcttatgtgaaagtcctaagcttattagggacatctctggaggtagcatgctcagacgtttctagaatcaacctacagggatactgaggatcagctatgtaaattctctcttatttctgtgtgaatgtgtatgtttaatgtctcccctgaagataaggagaaagtgttgaaaaagagcgaacacgagatgttggtccataacaaacctgtgaccattgtcctggaaactactaaaaagccagtagaggacctgagacccagactcccatccttgacacagccagtggagacaccaagctccagacctccgtccttgacggggtctctggatgaagcactttgtgatgacatacatccccaggacgggctcgtttctaactctgttgactcagttgtccaaaaggtgagtgttgacagaggagctgatgctgccctggcatctgctcctcccttcccctcggtgttttcgggcagccttgtgcaccccggactgtacagggaggaatgaagcttagttggtacaggtggattagcaagatctcagccagcctgagttagggagaaacagccttctctggacatggttttcagggaaacctccctctttattggggtgaacaggggctatataaacctgcggaagtgggtaggggtttcggaggtgagtgtcatcattggctgggggcatagatgctggggaatgctttatttgtgtgaagaggaattccaggtgcttgcttgctggacatgtccttttaaggagagaggaagtttaacttgtgatctagccaccaggctacaagactgcctcgagtggtggaggtgggggtcataaggctcctgtgcactgggacatcctggttccgaccaaggaggaagcagtcctggagtctgcgggtctccagatgtgattttcaggttcaaacgtatctggacctcactcttgctcctgactggcacccctggtctcacagctttgggaacccacaagctggcactgtttctacaactgcttctgtggtcaccgcctctgcctttttggtctaacaaccttgtcccaggggctagctccaggcgaggcactggtctaggcactggactacagaggcacagagacaagattcccatcctcatgcagcctgtattgggtgagcagacaggaagcaatgagctgagtagaagtacttccaagactaagacatgcaagaattaaaaacagagttttgtctcagagaagagcagggtgagggcttgcaaggggacaatgggagaacttcttgatgaagtgacatttagcctgaggcttaaatgataagagtgcatcagctatttaaaaaaaaaaaaatgtgttttccaaatagagactattttctgtgtgccaggcagtgttgtaggggctggggacacagacacattgcagactgctcttagggcccttagctatctagtaagggaagcaaagaatagtaaatagatttataataaaagtctttccagcaacaagtgcaggaagaataaaggcagatatgtgacagtggcagaaacactctcataaatagggcgcaaacgaagagacacacagatccaaatgatgcttcatctaaaaatcaggaataaatgaaaagagagtaagtaagaaaagctgtgtggctttgtaattaggacattccaggctgagggaaacgcatgcacagacctcccaggaattgatgtcttgaactcagaagtctcagtgaggcaagagtagggagcaggcagtgagcaagagaggcacgtgagaggctgggcacgtgaaagggtactgtgaaggcagagctgagggtttgaacttccgctgtggagcttcgcctgatgttttggggccccggtggtgcaggatccagattgtatttgtcaaggatcgctctggctgctgcactgaagcccaggcattgaagaagccaggatgcaaggtcagtggctgcagtgggctaggtggatgacatcctagattctaggtggtcctgatggaggtgtgggaaagactgattctggaaataccctgaggctctaatctagagaagaaaatgctctctgtggactagagagcatctggaaaaactctgagtgggaaccaatcatcagaaatgttgcttttatattacattcaatttgcctgtatcctttttatccaaatctggtatttctaactcatcactgaacttttaaaaaaccaaggtttaaaagacttagtaactttccatgagttaagtgttccatgcactagggttttccttttattgtatttggttttcttgtttgtttgtttgtttgtttgttttttcaagacagagtttctctatgtagtcctggctatcctggtctctatttaggccagcctggcctcaaacacagagatcctctgcctcttcctcctgagtgctgggattaaaggcttatgccaccacctcctggctgctttggggttttcttaaagtaagagagtaagtaagaaaaaaacagggtgagacaacgctaggcgactccatcttggatttagagctacctttgaagttcaaagctcgcaaactctttcttgagaaccacagcagcttcaaggagttgtcttttctcaacccttagtcctcaagggtcaagcagactgtggcagctctagacaccgatctcttggccattgagtgttagaaaatgttcatgcccaggcttccttgcaaaccagttgtatgagcctctgcaatgaggtctggccttggctttcgttgattaattcatgtttagacactgctccctccccaccgcacccccaaggtgagtctaatgtgcaaagggggctggcaagcctcacttgtagctcctctcaggggacttaagaagtcagtcaccgctaataaaaaaaagatggtataatttctgggtgcctttctgcaaaggggtggatattctgagacatcttatttgtaccttcttcttaaaccttcagatctttcttgctgtgaccgctgagctgaactgtgacctgctctctaaagagcagagagcatctataaccactgtctgccctcacatcatcaaaagcatggagggtagtgatggaattaagaaggtgtgtggcaacttcaaagatattgaaaagatacatcacttcttgagtgagcagcttttggaacgggagcagaaacggaagggaagcgagcagaaacggaagtgcgccccacagaaacacacacctcccgatgtggagcgggagccccctgatcagagcagtattcaagttcctgtgcttctccttgaatatttcaagcatgttaatccgggtagactagagttcatagagtacaaatttggtgtaaacattgaaatccaagctagttctcccaatatggtcactgtaggcttcacctccagcccatttggcaacgtagaagaagcaagtcagtcctttgtcagagactttcagaaatgctcgcagtctctgaagcaagattgtatctctttagaggagcaccagagagcaaaggaggtcagacaggagctgagtcgctgcttcccaaagctcttgataaagggacagggaagaacgctgactctcctcggctctcctgctgacatttcagccgccacagaaaaagtctcccaaggtcttggcctgagacctgtgaaaataaccgcatctgggtacacgacgggcatcgaggtcgattcaacacgctttaagcttctagagcctgaactgctccaggaaatctcagagatcgagcagaagtttaacacccgtggcaaagtccaggaaaaaggccagaaaacctgcattctttttgtccccaaggataaagacttagacctgtcagtgcagtcctacacaggttttactgatgccttccagcgtgccacgtggcagctgaggacagaagttctgtcgctgaaagggttgggcaaggagagagctcgcttacacaataccaagtttgccgacaactttaaaaaagagcacccgaatgtgcactttgtgacatctcaggagtcagtgaccttgactggcttgccacatcaccttgcgcaggcaatgcagtatgtctccaaaagaatgggactggcaccgtcatctggagagaaactcgctatggatcaggaaacccccatggagatcagcagtagtgacccccatggagatcagcaggagaatgcagccttacctgctccccgaggcacctctagcagccctgcagcttcgaaggggactgaggactactgtgtcatctgcatggataccatcagcaacaagcacgtgctccccaagtgcaagcatgaattctgcacctcgtgtatcagcaaagccatgcttatcaagcctgtctgtcctgtgtgtctgacttcctacggcatccagaaagggaaccagccagagggaaccatgtcttactccactcaaaaagggtcacttccaggttatgaaggctgtggcaccattgtgattaattatgaaataaaagatggcatccaaacagtaagtgtgcccgaggaacatgggtttcttttcgctatgctagaattgccaaagtccaacggggcatcctatagcctcttagataatgattttcccaggaaatcattcattctgtgattgtgggtcggttataacagaggcagagatcgtgttgcatgcttagaaattagatgcctttttaattattttgacaatgtattgaactcagagccttggacgtgccaagcaagcacctatgagctatacccctagcgtttcatgtcgtctttggggggcgggggagtgagacaaggtttctccatgtaatagctggctgtcctggaactcaatttgtaaagcagattggcctcaaactcacagagatccacctgcctctgcctccagagtgctggaattaaaggtgtgtaccaccaccacctggcctcatgtctttttattaaagatagaattcatatgttaggatgggaggagttgggcaggtagtgttctaatttgaagagaactatgaattattcagaatatgagtaaaatgttaatatttttctggctttcaataggcttcatctaccatgaacataactttactaaaaatagaggcatccatatgtgtacacacatgcacacacccacatacacacacacacacacacacatacacatatataattttcttttcttcatacagaaagagcacccaaacccaggaaaggcttatcatggaacacggcgaactgcatacttgcctgataatactgagggaagaaaggttttggatctgctccacgaagcctttaagcacagactgactttcacaataggatactctcgagcaacaggagtctcggatgtcattacatggaatgatattcatcacaaaacatccaagtttggaggaccagcaaagtaagagccttttgaaatgtagtggttgctgaatgaagttcaaggttgtcaaacactgcagtttgaggctgtggggatagaaagacattctagcagtagatgttagcctggtgtcttagttagggttactgtagctgtgataacccaaaaaaaaacaacttcaggatgatgggtttatttgccttacatattctgagtcacaggccactgaaggaagacaaggcagaatctcaaaggaggcaggaacctgaagacaggaacggatgcagaggccatgaaggaacattggttatggcttgctcagcctgctttcttacagcatccaggatcaccagtccaggggtgacaccactgacattgggctgggcccttctgacatcaatctctaattaagaaaaagctatacagagaaaccctgtctcgaaaaaccaaaaagagagagagagagagagagagagagagagagagagagagagagagagagagagagagaaaggaaggaaggaagaaagaaagagaaagaaagaaagaaagaaagaaagaaagaaagaaagaaagaaagaaagaaagaaagaaagaaagaaagaaagaaagaaagaaagaaagaaaatgtcttacaggcttaccaaccacccagtcttatggaggcagccttctttgtaaccctgactgccttggaattcactctgtagaccaggccagcctgccttcgctgcccaagtgttgggattgaggttgtttgccaccaccccccccccaggaggcggtttctcaattgaggttttctcctctatgatgactccaacttgtgtcaaattgacataaaactagccaacagccacagcatacacataatagcccataatgataatttcaaagataaaaagactggtcccccaaccttctaccctgccattcataaggtattactcagttgtttagttctgctgcagaagaaaggggtttcagagcccaagatgaatactacccaagttgattaaatttagggtttcatgtttatttaaaagatagatcgtaggaacattatttgcctttgatttctgtttttcttttttaggtttatttatttttatgtgcattcgtggcttgcctgcatgtatgtttgtgtaagggtgtcagatgccctgaagttacagatagttgtgagctgccatgcaggtgttgggaattgaacccaggtcttctgtaaaagcagcccctgctcttaaccattgagtcatctctccagcatggctttgattccttttaaggtcctcgccctcttcctcgcctctctcttcccatcagtccacaatgatactgaactcacaagactaatatatggtagcagaagtcttagttataaagggtcccaagatggtgggagatatattccaggaaatctgactgaattcctctacctctggcatccaaaagaaatatatcatgaagccttttcagatcccccaatttgaaaagcccacaggggctggagagatggcttagtggttaagaacactgattgctcttccagaggtccagagttcaattcccaacaaccacatggtagctcacaaccatctgtaatgggatccaatgccttcttctggtgtgtttgcccataagtgtatgactactactgcctctgtagaatatgacagttataacattatgtgcatcagtacttagaataagttaagaatttaagcaatctgtctagaaaacagatgctggtcagccagccaggcacttggatgactagatattagtcactgtctggattgccggagaatgtttggaacccagaatactagatgctcaaatgtaagtagtacctacagtttttgttgttgttttgaggcaaagtctccttatgtggctcaggctggcctcaaactcatagagctctgactgttgtgtcacctgagtgttgcgcacctgtgccacaataaccagctgtcatacacattcttaagaattctttgggaagaagctaaagtgtttcttgttttcttcctgcagttttggctaccctgatcctgattacctgaaacgtgtcaaggaggagctgaaagcaaaaggcattgagtaaggaaactgcagggaagatgtctgtccactctcaaaagacatgtgtcaggaggctggatagtacagaccaaaatctgtttctagaacgactttgtaacatttttcatgttaagtagtctgtttgccagtcttttctagagtggctggcactctttcatggaaggcaaactctacaggcacaggctggggggaatggccctgtctacaaagcatgaagaaatgagctcagatctgaaattatccatggaaaagcctggtgtgttggcatgcacttgtaatcttagcactggtgagtagagacaggaggattcctggagcttactggccaactagcctagttaaaaccatgagctctggattcactgagagaccttatctcaagaaataaggtggatcgggacatgggggtgcatgcctttaatgtcagaacttggaaggcagaagcgggcaatctctgagttccagacctcacctggtctacagtgtccaagtcccaggacagccagctatacatagtgagaccttgtctcaaaacaaatattaggaagacagaaacaaatatatctaacatcatcctctgttctgcatacacacctacacacacacacacactggggagcggggagatagaaaagaaaactttatagttttataggatttcaatttttgctgaagaaatctgacgtcattcttgtgttacggttggggtgttgggtgagtctgtaatcatcttctatgtccttacataatggaaccttccctgatttttgtttgctttgtttatttgagacagggtctcactgcatagctctggaactcaatttgtggaccagcttggtcttgaacttagatctgcctatatcagcctcctgagtgctggcattgcctggttttttgtttgtttgtttgtttgtttgtttgggggttttggttttagcttttttggtttgggttgatttggtttggtttagttcggcttgatttgattttgatgttggaatttaaaccctaggccagtgagttccatcccataattctttttcatgtccatctctgtagcaatacattagttgtttattttttaatctcttcctgaacccttgtgtaagtgggaaagtgaaacccttgtataaatgggaactttaaaaacaggtttggcagccggacgtggtggcgcacccctttaatcccagcacttgggaggcagaggcaggtggatttctgagttcgaggccagcctggtctacagagtgagttccaggacagccagggctatacagagaaaccctgtctaggaaaaaaaaaaaaaaaagacaacaacaacaacaacaaacaggtttggctggaaaagactcatatttccttccctacccatagcaagagaagtttccaggagatgaggcaacttttggtaataaatagaacaaaaagacttatatttttcaggacacagagcctaggagatactgtgtgactactgcctgactcaagatgctagtagctcagcagaggagtgaatagataaaaagatatgttccccaaatcttcgggagagagatgacttgagaccgtgacattcatttggaaaatagttttcttaccccaacttgtactgattagacactgactaagccttgaatttgggctctactctcccctgatccatggaacctgtcctagaggatgcacttgccctgccacagaagtgcaacatagtttttatattcttccctacacattatgttgtacttttagaatatatattgtttcaagttttaacgggtaaatagccttcccttagtttaatatttcacagtatttgctacctgcaatgtagtggctttttgttttttaatcctttgagcgaatcccagcagtctgttatctcatatatagtctttctaatcctttccctggacaggagtaaaggagaaagttcaacctactgtagagtctggatggcacatcacagttcactgtaagtggttctccaagttagaagaaaaccacagcaggcaatgacctggtgatctgtattccagccactctccaaaatggtagatgacaccctaaccttctccttaagacacatatgcacatacataaaaccattttggccagatattaataggaagtattaatcaagtacttatcctgtaagtacttaacattgatgggatcaatctgattaatagctctattctttgaacagaaaactcatatacagagcacagtagtcaatcactgagggtgacataaccaataagtagaagtgctaacttttactttcatccccattttggtttttttgtttgtttagattttttttttttttttttttgagccagggtctcatgtaacctagactggcctctccctatgtagccaaggctattcttgaactctgaccctcctgcctcacctcctgcccaggttcttgcatgtatcctaggcagagctctcaggatctgcttccacagccttccaagtgcaaggcctgcaccatcatagctgccttctgcatccggttcggacctttccctttggatgattcaccaagtgtttatcattaagaccaactgatcattttctgtcttctaatcttgtaatcaaatttactctaaagaagaaaaaaatggtttctgttaagttctggatcttttatttcatccagtgtgcacatgcaaattccacgtggtggagggctcaatgacatttggatttttttcttttgcaaggtgttattatctgcattaaataaagtcaggtccttacatacaac

SEQ ID NO: 292 - DNA, 5142 bp, Mus musculus
ctggggaatcgaaactgaaactttgcctctcgggtctttagggcagggctcgcctttgctcttccctgtctgtgcagcgcccctgagccccaaacgagccagacgcggatagccatggcttccagtcccgacccgccgtccccgctactcgtacggctgcgggagtccatccccaaggcgcacaggaagctcgagatatacttccagagccgggcctcgggaggtggggagtgctctgtccagcccgtgggccccagcgccccggacacctacgaggtgaagttcctaaaaaaagcagataaggagaaagtgttgaaaaagagcgaacacgagatgttggtccataacaaacctgtgaccattgtcctggaaactactaaaaagccagtagaggacctgagacccagactcccatccttgacacagccagtggagacaccaagctccagacctccgtccttgacggggtctctggatgaagcactttgtgatgacatacatccccaggacgggctcgtttctaactctgttgactcagttgtccaaaagatctttcttgctgtgaccgctgagctgaactgtgacctgctctctaaagagcagagagcatctataaccactgtctgccctcacatcatcaaaagcatggagggtagtgatggaattaagaaggtgtgtggcaacttcaaagatattgaaaagatacatcacttcttgagtgagcagcttttggaacgggagcagaaacggaagggaagcgagcagaaacggaagtgcgccccacagaaacacacacctcccgatgtggagcgggagccccctgatcagagcagtattcaagttcctgtgcttctccttgaatatttcaagcatgttaatccgggtagactagagttcatagagtacaaatttggtgtaaacattgaaatccaagctagttctcccaatatggtcactgtaggcttcacctccagcccatttggcaacgtagaagaagcaagtcagtcctttgtcagagactttcagaaatgctcgcagtctctgaagcaagattgtatctctttagaggagcaccagagagcaaaggaggtcagacaggagctgagtcgctgcttcccaaagctcttgataaagggacagggaagaacgctgactctcctcggctctcctgctgacatttcagccgccacagaaaaagtctcccaaggtcttggcctgagacctgtgaaaataaccgcatctgggtacacgacgggcatcgaggtcgattcaacacgctttaagcttctagagcctgaactgctccaggaaatctcagagatcgagcagaagtttaacacccgtggcaaagtccaggaaaaaggccagaaaacctgcattctttttgtccccaaggataaagacttagacctgtcagtgcagtcctacacaggttttactgatgccttccagcgtgccacgtggcagctgaggacagaagttctgtcgctgaaagggttgggcaaggagagagctcgcttacacaataccaagtttgccgacaactttaaaaaagagcacccgaatgtgcactttgtgacatctcaggagtcagtgaccttgactggcttgccacatcaccttgcgcaggcaatgcagtatgtctccaaaagaatgggactggcaccgtcatctggagagaaactcgctatggatcaggaaacccccatggagatcagcagtagtgacccccatggagatcagcaggagaatgcagccttacctgctccccgaggcacctctagcagccctgcagcttcgaaggggactgaggactactgtgtcatctgcatggataccatcagcaacaagcacgtgctccccaagtgcaagcatgaattctgcacctcgtgtatcagcaaagccatgcttatcaagcctgtctgtcctgtgtgtctgacttcctacggcatccagaaagggaaccagccagagggaaccatgtcttactccactcaaaaagggtcacttccaggttatgaaggctgtggcaccattgtgattaattatgaaataaaagatggcatccaaacaaaagagcacccaaacccaggaaaggcttatcatggaacacggcgaactgcatacttgcctgataatactgagggaagaaaggttttggatctgctccacgaagcctttaagcacagactgactttcacaataggatactctcgagcaacaggagtctcggatgtcattacatggaatgatattcatcacaaaacatccaagtttggaggaccagcaaattttggctaccctgatcctgattacctgaaacgtgtcaaggaggagctgaaagcaaaaggcattgagtaaggaaactgcagggaagatgtctgtccactctcaaaagacatgtgtcaggaggctggatagtacagaccaaaatctgtttctagaacgactttgtaacatttttcatgttaagtagtctgtttgccagtcttttctagagtggctggcactctttcatggaaggcaaactctacaggcacaggctggggggaatggccctgtctacaaagcatgaagaaatgagctcagatctgaaattatccatggaaaagcctggtgtgttggcatgcacttgtaatcttagcactggtgagtagagacaggaggattcctggagcttactggccaactagcctagttaaaaccatgagctctggattcactgagagaccttatctcaagaaataaggtggatcgggacatgggggtgcatgcctttaatgtcagaacttggaaggcagaagcgggcaatctctgagttccagacctcacctggtctacagtgtccaagtcccaggacagccagctatacatagtgagaccttgtctcaaaacaaatattaggaagacagaaacaaatatatctaacatcatcctctgttctgcatacacacctacacacacacacacactggggagcggggagatagaaaagaaaactttatagttttataggatttcaatttttgctgaagaaatctgacgtcattcttgtgttacggttggggtgttgggtgagtctgtaatcatcttctatgtccttacataatggaaccttccctgatttttgtttgctttgtttatttgagacagggtctcactgcatagctctggaactcaatttgtggaccagcttggtcttgaacttagatctgcctatatcagcctcctgagtgctggcattgcctggttttttgtttgtttgtttgtttgtttgtttgggggttttggttttagcttttttggtttgggttgatttggtttggtttagttcggcttgatttgattttgatgttggaatttaaaccctaggccagtgagttccatcccataattctttttcatgtccatctctgtagcaatacattagttgtttattttttaatctcttcctgaacccttgtgtaagtgggaaagtgaaacccttgtataaatgggaactttaaaaacaggtttggcagccggacgtggtggcgcacccctttaatcccagcacttgggaggcagaggcaggtggatttctgagttcgaggccagcctggtctacagagtgagttccaggacagccagggctatacagagaaaccctgtctaggaaaaaaaaaaaaaaaagacaacaacaacaacaacaaacaggtttggctggaaaagactcatatttccttccctacccatagcaagagaagtttccaggagatgaggcaacttttggtaataaatagaacaaaaagacttatatttttcaggacacagagcctaggagatactgtgtgactactgcctgactcaagatgctagtagctcagcagaggagtgaatagataaaaagatatgttccccaaatcttcgggagagagatgacttgagaccgtgacattcatttggaaaatagttttcttaccccaacttgtactgattagacactgactaagccttgaatttgggctctactctcccctgatccatggaacctgtcctagaggatgcacttgccctgccacagaagtgcaacatagtttttatattcttccctacacattatgttgtacttttagaatatatattgtttcaagttttaacgggtaaatagccttcccttagtttaatatttcacagtatttgctacctgcaatgtagtggctttttgttttttaatcctttgagcgaatcccagcagtctgttatctcatatatagtctttctaatcctttccctggacaggagtaaaggagaaagttcaacctactgtagagtctggatggcacatcacagttcactgtaagtggttctccaagttagaagaaaaccacagcaggcaatgacctggtgatctgtattccagccactctccaaaatggtagatgacaccctaaccttctccttaagacacatatgcacatacataaaaccattttggccagatattaataggaagtattaatcaagtacttatcctgtaagtacttaacattgatgggatcaatctgattaatagctctattctttgaacagaaaactcatatacagagcacagtagtcaatcactgagggtgacataaccaataagtagaagtgctaacttttactttcatccccattttggtttttttgtttgtttagattttttttttttttttttttgagccagggtctcatgtaacctagactggcctctccctatgtagccaaggctattcttgaactctgaccctcctgcctcacctcctgcccaggttcttgcatgtatcctaggcagagctctcaggatctgcttccacagccttccaagtgcaaggcctgcaccatcatagctgccttctgcatccggttcggacctttccctttggatgattcaccaagtgtttatcattaagaccaactgatcattttctgtcttctaatcttgtaatcaaatttactctaaagaagaaaaaaatggtttctgttaagttctggatcttttatttcatccagtgtgcacatgcaaattccacgtggtggagggctcaatgacatttggatttttttcttttgcaaggtgttattatctgcattaaataaagtcaggtccttacatacaac

SEQ ID NO: 293 - protein, 748 aa, Mus musculus
MASSPDPPSPLLVRLRESIPKAHRKLEIYFQSRASGGGECSVQPVGPSAPDTYEVKFLKKADKEKVLKKSEHEMLVHNKPVTIVLETTKKPVEDLRPRLPSLTQPVETPSSRPPSLTGSLDEALCDDIHPQDGLVSNSVDSVVQKIFLAVTAELNCDLLSKEQRASITTVCPHIIKSMEGSDGIKKVCGNFKDIEKIHHFLSEQLLEREQKRKGSEQKRKCAPQKHTPPDVEREPPDQSSIQVPVLLLEYFKHVNPGRLEFIEYKFGVNIEIQASSPNMVTVGFTSSPFGNVEEASQSFVRDFQKCSQSLKQDCISLEEHQRAKEVRQELSRCFPKLLIKGQGRTLTLLGSPADISAATEKVSQGLGLRPVKITASGYTTGIEVDSTRFKLLEPELLQEISEIEQKFNTRGKVQEKGQKTCILFVPKDKDLDLSVQSYTGFTDAFQRATWQLRTEVLSLKGLGKERARLHNTKFADNFKKEHPNVHFVTSQESVTLTGLPHHLAQAMQYVSKRMGLAPSSGEKLAMDQETPMEISSSDPHGDQQENAALPAPRGTSSSPAASKGTEDYCVICMDTISNKHVLPKCKHEFCTSCISKAMLIKPVCPVCLTSYGIQKGNQPEGTMSYSTQKGSLPGYEGCGTIVINYEIKDGIQTKEHPNPGKAYHGTRRTAYLPDNTEGRKVLDLLHEAFKHRLTFTIGYSRATGVSDVITWNDIHHKTSKFGGPANFGYPDPDYLKRVKEELKAKGIE

SEQ ID NO: 294 - DNA, 5136 bp, Mus musculus
ctggggaatcgaaactgaaactttgcctctcgggtctttagggcagggctcgcctttgctcttccctgtctgtgcagcgcccctgagccccaaacgagccagacgcggatagccatggcttccagtcccgacccgccgtccccgctactcgtacggctgcgggagtccatccccaaggcgcacaggaagctcgagatatacttccagagccgggcctcgggaggtggggagtgctctgtccagcccgtgggccccagcgccccggacacctacgaggtgaagttcctaaaaaaagcagataaggagaaagtgttgaaaaagagcgaacacgagatgttggtccataacaaacctgtgaccattgtcctggaaactactaaaaagccagtagaggacctgagacccagactcccatccttgacacagccagtggagacaccaagctccagacctccgtccttgacggggtctctggatgaagcactttgtgatgacatacatccccaggacgggctcgtttctaactctgttgactcagttgtccaaaagatctttcttgctgtgaccgctgagctgaactgtgacctgctctctaaagagcagagagcatctataaccactgtctgccctcacatcatcaaaagcatggagggtagtgatggaattaagaaggtgtgtggcaacttcaaagatattgaaaagatacatcacttcttgagtgagcagcttttggaacgggagcagaaacggaagggaagcgagcagaaacggaagtgcgccccacagaaacacacacctcccgatgtggagcgggagccccctgatcagagcagtattcaagttcctgtgcttctccttgaatatttcaagcatgttaatccgggtagactagagttcatagagtacaaatttggtgtaaacattgaaatccaagctagttctcccaatatggtcactgtaggcttcacctccagcccatttggcaacgtagaagaagcaagtcagtcctttgtcagagactttcagaaatgctcgcagtctctgaagcaagattgtatctctttagaggagcaccagagagcaaaggaggtcagacaggagctgagtcgctgcttcccaaagctcttgataaagggacagggaagaacgctgactctcctcggctctcctgctgacatttcagccgccacagaaaaagtctcccaaggtcttggcctgagacctgtgaaaataaccgcatctgggtacacgacgggcatcgaggtcgattcaacacgctttaagcttctagagcctgaactgctccaggaaatctcagagatcgagcagaagtttaacacccgtggcaaagtccaggaaaaaggccagaaaacctgcattctttttgtccccaaggataaagacttagacctgtcagtgcagtcctacacaggttttactgatgccttccagcgtgccacgtggcagctgaggacagaagttctgtcgctgaaagggttgggcaaggagagagctcgcttacacaataccaagtttgccgacaactttaaaaaagagcacccgaatgtgcactttgtgacatctcaggagtcagtgaccttgactggcttgccacatcaccttgcgcaggcaatgcagtatgtctccaaaagaatgggactggcaccgtcatctggagagaaactcgctatggatcaggaaacccccatggagatcagcagtagtgacccccatggagatcagcaggagaatgcagccttacctgctccccgaggcacctctagcagccctgcagcttcgaaggggactgaggactactgtgtcatctgcatggataccatcagcaacaagcacgtgctccccaagtgcaagcatgaattctgcacctcgtgtatcagcaaagccatgcttatcaagcctgtctgtcctgtgtgtctgacttcctacggcatccagaaagggaaccagccagagggaaccatgtcttactccactcaaaaagggtcacttccaggttatgaaggctgtggcaccattgtgattaattatgaaataaaagatggcatccaaacacacccaaacccaggaaaggcttatcatggaacacggcgaactgcatacttgcctgataatactgagggaagaaaggttttggatctgctccacgaagcctttaagcacagactgactttcacaataggatactctcgagcaacaggagtctcggatgtcattacatggaatgatattcatcacaaaacatccaagtttggaggaccagcaaattttggctaccctgatcctgattacctgaaacgtgtcaaggaggagctgaaagcaaaaggcattgagtaaggaaactgcagggaagatgtctgtccactctcaaaagacatgtgtcaggaggctggatagtacagaccaaaatctgtttctagaacgactttgtaacatttttcatgttaagtagtctgtttgccagtcttttctagagtggctggcactctttcatggaaggcaaactctacaggcacaggctggggggaatggccctgtctacaaagcatgaagaaatgagctcagatctgaaattatccatggaaaagcctggtgtgttggcatgcacttgtaatcttagcactggtgagtagagacaggaggattcctggagcttactggccaactagcctagttaaaaccatgagctctggattcactgagagaccttatctcaagaaataaggtggatcgggacatgggggtgcatgcctttaatgtcagaacttggaaggcagaagcgggcaatctctgagttccagacctcacctggtctacagtgtccaagtcccaggacagccagctatacatagtgagaccttgtctcaaaacaaatattaggaagacagaaacaaatatatctaacatcatcctctgttctgcatacacacctacacacacacacacactggggagcggggagatagaaaagaaaactttatagttttataggatttcaatttttgctgaagaaatctgacgtcattcttgtgttacggttggggtgttgggtgagtctgtaatcatcttctatgtccttacataatggaaccttccctgatttttgtttgctttgtttatttgagacagggtctcactgcatagctctggaactcaatttgtggaccagcttggtcttgaacttagatctgcctatatcagcctcctgagtgctggcattgcctggttttttgtttgtttgtttgtttgtttgtttgggggttttggttttagcttttttggtttgggttgatttggtttggtttagttcggcttgatttgattttgatgttggaatttaaaccctaggccagtgagttccatcccataattctttttcatgtccatctctgtagcaatacattagttgtttattttttaatctcttcctgaacccttgtgtaagtgggaaagtgaaacccttgtataaatgggaactttaaaaacaggtttggcagccggacgtggtggcgcacccctttaatcccagcacttgggaggcagaggcaggtggatttctgagttcgaggccagcctggtctacagagtgagttccaggacagccagggctatacagagaaaccctgtctaggaaaaaaaaaaaaaaaagacaacaacaacaacaacaaacaggtttggctggaaaagactcatatttccttccctacccatagcaagagaagtttccaggagatgaggcaacttttggtaataaatagaacaaaaagacttatatttttcaggacacagagcctaggagatactgtgtgactactgcctgactcaagatgctagtagctcagcagaggagtgaatagataaaaagatatgttccccaaatcttcgggagagagatgacttgagaccgtgacattcatttggaaaatagttttcttaccccaacttgtactgattagacactgactaagccttgaatttgggctctactctcccctgatccatggaacctgtcctagaggatgcacttgccctgccacagaagtgcaacatagtttttatattcttccctacacattatgttgtacttttagaatatatattgtttcaagttttaacgggtaaatagccttcccttagtttaatatttcacagtatttgctacctgcaatgtagtggctttttgttttttaatcctttgagcgaatcccagcagtctgttatctcatatatagtctttctaatcctttccctggacaggagtaaaggagaaagttcaacctactgtagagtctggatggcacatcacagttcactgtaagtggttctccaagttagaagaaaaccacagcaggcaatgacctggtgatctgtattccagccactctccaaaatggtagatgacaccctaaccttctccttaagacacatatgcacatacataaaaccattttggccagatattaataggaagtattaatcaagtacttatcctgtaagtacttaacattgatgggatcaatctgattaatagctctattctttgaacagaaaactcatatacagagcacagtagtcaatcactgagggtgacataaccaataagtagaagtgctaacttttactttcatccccattttggtttttttgtttgtttagattttttttttttttttttttgagccagggtctcatgtaacctagactggcctctccctatgtagccaaggctattcttgaactctgaccctcctgcctcacctcctgcccaggttcttgcatgtatcctaggcagagctctcaggatctgcttccacagccttccaagtgcaaggcctgcaccatcatagctgccttctgcatccggttcggacctttccctttggatgattcaccaagtgtttatcattaagaccaactgatcattttctgtcttctaatcttgtaatcaaatttactctaaagaagaaaaaaatggtttctgttaagttctggatcttttatttcatccagtgtgcacatgcaaattccacgtggtggagggctcaatgacatttggatttttttcttttgcaaggtgttattatctgcattaaataaagtcaggtccttacatacaac

SEQ ID NO: 295 - protein, 746 aa, Mus musculus
MASSPDPPSPLLVRLRESIPKAHRKLEIYFQSRASGGGECSVQPVGPSAPDTYEVKFLKKADKEKVLKKSEHEMLVHNKPVTIVLETTKKPVEDLRPRLPSLTQPVETPSSRPPSLTGSLDEALCDDIHPQDGLVSNSVDSVVQKIFLAVTAELNCDLLSKEQRASITTVCPHIIKSMEGSDGIKKVCGNFKDIEKIHHFLSEQLLEREQKRKGSEQKRKCAPQKHTPPDVEREPPDQSSIQVPVLLLEYFKHVNPGRLEFIEYKFGVNIEIQASSPNMVTVGFTSSPFGNVEEASQSFVRDFQKCSQSLKQDCISLEEHQRAKEVRQELSRCFPKLLIKGQGRTLTLLGSPADISAATEKVSQGLGLRPVKITASGYTTGIEVDSTRFKLLEPELLQEISEIEQKFNTRGKVQEKGQKTCILFVPKDKDLDLSVQSYTGFTDAFQRATWQLRTEVLSLKGLGKERARLHNTKFADNFKKEHPNVHFVTSQESVTLTGLPHHLAQAMQYVSKRMGLAPSSGEKLAMDQETPMEISSSDPHGDQQENAALPAPRGTSSSPAASKGTEDYCVICMDTISNKHVLPKCKHEFCTSCISKAMLIKPVCPVCLTSYGIQKGNQPEGTMSYSTQKGSLPGYEGCGTIVINYEIKDGIQTHPNPGKAYHGTRRTAYLPDNTEGRKVLDLLHEAFKHRLTFTIGYSRATGVSDVITWNDIHHKTSKFGGPANFGYPDPDYLKRVKEELKAKGIE

SEQ ID NO: 296 - DNA, 10775 bp, Homo sapiens
atggcctcccacctgcgcccgccgtccccgctcctcgtgcgggtgtacaagtccggcccccgagtacgaaggaagctggagagctacttccagagctctaagtcctcgggcggcggggagtgcacggtcagcacccaggaacacgaagccccgggcaccttccgggtggagttcagtgaaagggcaggtgagcttcgggcggccaggctgcgaaagccctctgggggcccggcccccgggtttccaggcggacccagttccagctgacctaggggagagggcgggagaaagtatgtcactgtgcggtggcggacagggacggggccctactgccaagagactcactgagacagtgaacactcggtggaggatggggcctcacatgtgcctggtgcgggtctggctgacggcgccttagtgtggatgctttccatatcctcattctaacttaatttctcagctgtcatcttccttcccccagatgcctgccagctgctgtccttgtcattcagggattccacttttatgttttaaataatggttccattgttccatccatgaacaaaaggatgttccattttgtgtttttgaggattacaaaagtgatatatgctcactatagaaataaaagagtaaaaaagaaaacaacctgaagataaacaatgtgaccatttggtgtatttccttcctgcctttttttatgaatgccagcaaacacatgtatatttacaaaattcggagtctgcacttttgattcctgctgttgtcacttacctgtataatgagtattgaaatgggagactgggccgggtgcggtggctcacgcctgtaatcctagcactttggaggccgaggttggtggatcacctgaggccaggagttcgagaccagcctggccaacatggggaaattccgtctctactaataatacaaaaattacccgggcatggtggtgcgcacctgtaatccaagctactctggaggctgaggcaggagaatcgctggaactcgggaggcagagaggttgcagtgagacgaggtcctaccattgcactccagcctgggtgacagagtgagactccgtctaaaaaaaaaaaaaaaaaaaaaaagaaggaaggaagggagggagggagggaaagaaggaagaaggaaaggggagactggagacagttttagaaacatgatgtttaatcggtggacaatgttccattgtcattaagctttcacttctatagtaaaacttaatccgcacactttagagctcttaatagctccccgactttctccatcgccaacccaccattccaggatgcagggagcagccttactgggaggtgctggggcagagtacagacacaggaatgagaggattacttgaaatctctcccatttttatgtgtgtatatgtgtgtgtttaatgtctccactgaagctaaggagagagtgttgaaaaaaggagagcaccaaatacttgttgacgaaaaacctgtgcccattttcctggtacccactgaaaattcaataaagaagaacacgagacctcaaatttcttcactgacacaatcacaagcagaaacaccgtctggtgatatgcatcaacatgaaggacatattcctaatgctgtggattcctgtctccaaaaggtgagtattgaaagaaggagctggctgtgcctgcgcctcctctccagtcaccagcctcatgtattattgatccaacacccatgtgctgggcacgtacatgggagccaggcactgttttaggcactggacacagagatgaatataacagacaaggcccctgctctcaggcagcttatactgggggccaggtcatgcacagaaagacagtaggcaagtaaacaaaataaataaaaccattttatttatttggagagaaacagcgccagggcaagcaaggggaagatgggggtggtgttacttctttttttccccccaagacagagtctcactttatcgcccaggctggagtacagtggcacaatcatggctcactgcagagttgacctcctgggctcaagggatcctctcacctcagtctcctgagtagctaggactataggcgccactacacccagccaattttttttttttttgtagaaacagagtctcactatgttgcccaggctgttctcaaattcctgggctcaagcgatctgcccgccttggcctcccaaagtgctgggattacagtcatgaattactgcacctggcctggtgctacttctaaccagaaatcagagacaacttgactgaggaggtgatgtttggcctgaaacttgaatgatgacaagattcattcaacaatagatatccactgcctactgtgttccaggcactgttataggagctggggaggcagccaggaacatggcagactcggcttccagggacggcaccttctagagagagaaacagacaatattagtaaacaatagatatataataaaatgtctgccagtcatacctgctaggaagaagaataagtgacagacagtgacagaaccaccatttaaaataggatgtctggaaaaacctcaagtgaggtgacatctctagccaagtggatttctgggcggaaagtgtcctagagggaagcataggtgcaaagtccccaagagctgacattttgaggcccagaagctttaaggaagccagtgtggtggggagggcagtgagcaatggagagaggtgctaggaactcgggaaggtacccagaagacaggcctttggggctgaaggtaaggattttggatttttaacttaaaatgttaggggattcatcagatagttttgagccaggggagagggcgatctggtttatatttctaaagggtcactctggctgctgttggaaaactgaacgtagaaaggggatagaatggagagttagagcctggttaggaggggttgcagtgcgccaggtgaaagatgataatggcatgcactttggtggccttgatggaggtgtgagaaatggctggattcaggaaacattttgaagatctagaggaaggatcttaacatgcaaagtccttgagaaggaacaaaacattaggaattttgcttttatattacagtcaattggtctctgtcctttttatcttaacctggcgtgtcttatatttgagcttctaaaggccagggtttagaagggtccacaactttgcatgcagtcgagtgtttagttgaaacaagaataaaggaggaagagtgaagaagagaaaaaatagtaataggaaaagccattgccctcagttttatggctcccttccaagttcacaaacttttgtgagggccacaacaacttgcccagagagcacaggtgccttcccttgactgctgttcccaagatcaaacagctagtggcagttgtagaacacggatctcttggccatggagcttttagaaatgctcatgcccaggctccactgcagattagttaacatcagaatctctggggatgtgcttgggctttggctggtttgtttttccctgaattcgccaggtgagtcttatatgcagacagggctgagaacctctgggatgtagcgtgctgtatcctctaaaaaggatttgagaccaggcacggtggcacatgtctgtaatcccagcactttgggaggctgaggtgggtggatcacctgaggtcaggagttccaggctagcctgaccaacatggagaaacctcgtctctactaaagatacaaaattagccgggcgtggtggcacatgcctataatcccagctactcaggaggctgaggcaggagaattgcttgaacccgggaggcggaggttgcagtgagctgagatcgcgccattgcactccagcctgggtaacaagagtgaaactccatcttgaaataaataaataaataaataaataaataaataaataaataggatttgaaagaagttgcccccacttgggaaagatgtagtggttgtttctctagtctctatgcattctcctgaagagaagatggtaggcctgcatgctgagaggttttatttgttcctgttccttttaaaatttcagatctttcttactgtaacagctgacctgaactgtaacctgttctccaaagagcagagggcatacataaccacactgtgccctagtatcagaaaaatggaaggtcacgatggaattgagaaggtgtgtggtgacttccaagacattgaaagaatacatcaatttttgagtgagcagttcctggaaagtgagcagaaacaacaattttccccttcaatgacagagaggaagccactcagtcagcaggagagggacagctgcatttctccttctgaaccagaaaccaaggcagaacaaaaaagcaactattttgaagttcccttgccttactttgaatactttaaatatatctgtcctgataaaatcaactcaatagagaaaagatttggtgtaaacattgaaatccaggagagttctccaaatatggtctgtttagatttcacctcaagtcgatcaggtgacctggaagcagctcgtgagtcttttgctagtgaatttcagaagaacacagaacctctgaagcaagaatgtgtctctttagcagacagtaagcaggcaaataaattcaaacaggaattgaatcaccagtttacaaagctccttataaaggagaaaggaggcgaattaactctccttgggacccaagatgacatttcagctgccaaacaaaaaatctctgaagcttttgtcaagatacctgtgaaactatttgctgccaattacatgatgaatgtaattgaggttgatagtgcccactataaacttttagaaactgaattactacaggagatatcagagatcgaaaaaaggtatgacatttgcagcaaggtttctgagaaaggtcagaaaacctgcattctgtttgaatccaaggacaagcaggtagatctatctgtgcatgcttatgcaagtttcatcgatgcctttcaacatgcctcatgtcagttgatgagagaagttcttttactgaagtctttgggcaaggagagaaagcacttacatcagaccaagtttgctgatgactttagaaaaagacatccaaatgtacactttgtgctaaatcaagagtcaatgactttgactggtttgccaaatcaccttgcaaaggcgaagcagtatgttctaaaaggaggaggaatgtcttcattggctggaaagaaattgaaagagggtcatgaaacaccgatggacattgatagcgatgattccaaagcagcttctccgccactcaagggctctgtgagttctgaggcctcagaactggacaagaaggaaaagggcatctgtgtcatctgtatggacaccattagtaacaaaaaagtgctaccaaagtgcaagcatgaattctgcgccccttgtatcaacaaagccatgtcatataagccaatctgtcccacatgccagacttcctatggtattcagaaaggaaatcagccagagggaagcatggttttcactgtttcaagagactcacttccaggttatgagtcctttggcaccattgtgattacttattctatgaaagcaggcatacaaacagtaagtatttctcaagtccatgggtttcttgccactatgctacgattaccagggcaaaagagactgtcctgttgcctattagacaatagatttcccaaggaattatctccagggtcatgtgcaagggactgaaatagtggtaaaggtcacaatgtttgctggtaattcaaataccttttgtgtctatttcttaagacagagaaagggtgggtggagattatatcttgagatgggggtatcaggaaggtggacagtgtttccagcatgaattcaaggaaagaggagaaatatgagttattgggaatatgagcataacttcaatacctttcttgcttttgatttgctttatctacaaatgaacacatctatacctatagtaaaaattagacagggcactcttttcacatgacattttcttgttctcacacaggaagaacacccaaacccaggaaagagataccctggaatacagcgaactgcatacttgcctgataataaggaaggaaggaaggttttgaaactgctttatagggcctttgaccaaaagctgatttttacagtggggtactctcgcgtattaggagtctcagatgtcatcacttggaatgatattcaccacaaaacatcccggtttggaggaccagaaatgtgagatccttttgggatgtaatggctgctcaacagagtatagggattatgaaatacggcaatttctggatgtggatataagtagactctatagcagtggaattggtgttttgagagctgctgatcggggatggtaatctcaaagacagaaagattggtccccatcaacttctaccctgccagctataaagtactatggagttatttaaattttgcaccaaaggacagggggcttttgaatccgagatgaatactatataagctgatttaatttgaggcgttgtgtctatctgaaggctagatgctcggaatgtcactttgcttccttttaaggtcacctttctttttcaccccttcccccaccagtccacagagaacctgaaatcacttggccaataatattctagaaaaagtctaagttgtgaggagactattggtagaaactgtattatacgaaatccaattgttctttatgaaacccaaataggattcctcagacccttggcactaaagaaaaaatatataccctgagacttttccaaaaccttaaatttgaaaatcctactagcatgtgattacgatgcccccctaaaacacagtatattattatatttttaggagagtcactacttaccataaactgaaaaattttaagaattaacatagacatgaagcctcaaagtaaatcaacgtattactattcatcttggattctcaaaccccctgccctttgatgcgaaatgtaataaatacatcatattaatactttgtagttggcagggtagaagccagcttgaaaggcagatgctggccagacagctaggctcactcgctagcgaaatgactcgcatctgcgaatttaaaagtcatgatacgtcatccaccttcaggattacttgtgaatgtttgcaacactggatattaattaaatccttaaatgctggatatctattgcacatatccgaacaatttgtggtgacactaaaggaatttttgtttcttcaggtatggctatcctgatccttcttacctgaaacgtgtcaaagaggagctgaaagccaaaggaattgagtaagacaactgctggaagatgtcttaaatcaagctttcaaaaaaatatattttaggaggctgatttaatgccagtctaaatccttatgtagaaaggactttgaaatttttcttctcaagaaatggtttgtataagaataacaatctgctagtctgtcatttctggagtgatacttttttttttgagacggagtctgctctgtcgctcgcgctggagtgcagtggcatgatctcggctcactgcaagctccgcctcccaggttcatgccattctcctacctcagcctcccgagtagctgggactacaggcgcccaccaccatgcccggctaatttttgtttttgtatttttagtagagacagggtttcactgtgttagccaggatggtctcgatctcctgacctcgtgatccgcccgcctcggccttccaaagtgttgggattataggcgtgagccaccgcgcccagccctggagtgatactttttatggaagacaaaagccccccaaatctgtgtaaaatctgctgcaaaggtgtcatccctcttgtgtcatcactggggttagaggtgggtccgaaataatcttctgtgtccttcagttggactctcggctgccaattgatctctttttcattgccatctctggggtggttctttggttttttgtgtgttttccccttcatctctacctgtgaaagtgaaattctattgtaaatgggaggaaaaagggttggttgtgaaaaattaaagacccacattctgctttcttactcatggtaagaaaagtggccatgagtagagattgggcaagcattggtaataaatggaataagactattattattattatttgagatggagtctcactctgtcacccaggctggaatgcagtggtgtgatcttggctcactgcaacctccacttcccgggttcaagcgattctcctgcctcagcctcctgagtagctgggattacaggtgtgtgcctccacacccggctaattttttgtatttttagtagagacggggttttgccatgttggccaggctggtttcaaactcctgagctcaaatgatcctcctgccttggcctcccaaagtgctggaattacaggcatgagccaccacacccacacaagactatcatttttaatgaccaagagcctagtatatagttggtgcctgtcttagtctgtttgtgttgctataaaagaacacctgagactgggtaattgataaagaaaaaggtttgtttggctcacaattttgctggctagaaggttgggcatccggtgaaagcctcaggctgcttccattcatagcaaagggcagccagtgtgtgcagaaatcaaatgacagagaggaagtgagagagagaggtgtcggggaggtgccaggctctttttaacaagcagttcttcaggaactaagagtgagtcactcccatgagaacagcaccaagccattcatgggggaatctgcccccatgacccagacccctcccgttaggcttcacctccaacactgaggatcaaatttcaacatgagatttggaggaggtcaaacaaactaaactgtagcagtgtttcataaaattgtttgcctgactcaggttgctagtaagccagcagagggatatttgcctcctaaatctttggcagaggcaggagtaaggaagccatttctggagtccttgctactaatttggaaaactgagcttctttctttcattgctttttcccttaagagacaagtccttactatattgccctgtctctcaagggaagacatcaagactggacttgaactcctgggctcaagccatcccccaaccttggcctctcgagtagatgggattataggcatgtgccacggtgcctgacttgagtttcttattctagaacacttggagcctgaactctgaccaggcccctcacttgagcctttgctttctgctccttgtaaactgccatattgggtgcacttgccctgccacagtaatgctatatatttctgagcattgtttttctctagataattttatatttttgagtataccccacttccaagtgttttttgttttgttttgctttgtttttgttgttgttgttttgagacagggtctcactgtgtcccccaggctggagtgcagtggcacaatgacgactcactgcagcctcaacctcctggggccaagtgatcctcccacctcagcctctcaagtggctgggaccacagaagtgcaccaccatgcctggcttttttttttttttttggtcgagatggggtgtccctgtgttgcccagactggtcttgaactcctggactcaagggatcctcctgtcttgggctcccaaagtgttgggattacaggcgtgagtgaccatgcctagctcacttccaggtttaacagacaaaataaacttactctagtttccatctctatcattttataataaccgtagcccacattgtagtagtttttcagctctttactaagtcccaccaattcatgttttcacccttaaaatctttctcactgatactctctctggacagaaaaaaggtgaaataagcctactataaggaatatatgacatgctaaattttatttttaaacggttcttcaagtcagattaaagtaataatagcaaattatgtgattatccatgtcccagcctctctccaaaaaaatagtaaacaagatgtcttcttcttttcccaaagatacacatacacacatgtacaaatttttttatcagataataatagctaatatttaatgagtacttaccttagtttgtcccctttacaacagctttacatctgtgtgattgatacagttcatattcccattttataactgagaaaactggtgcacagagaggataagcaacttgccaaaggtcacacagttaataagtggaaatgctggggtatgaaccaggtagtctgcccccatagctctgccccccagagctgtactgtctcccatgagggtacttctccatggagcagcctgaggcgatccctttattctgggcttctctcagaaatggattcccacacagtattcaaagcaaatttccccagaggaaatcctattggaagaacttaaaaactcagaatctttttctttgtccagagagttgaggaagcttaagctaaatgatacatgtttttaaaaaaaaatcagattataaatttagtttttggtgattcattaaattctttactattatagttattttctagctgttcatcttttagctaaatttgttccaaagaagcaaaagtttggtttctactaagttctggattctggatgggagattgcactgtgtgtgacatgcaagtttcatggtgtgggagattgcagagcatttgggttactgcttttactctttggaagctgttatcatctgtatctgctttaaataaagttaaagatttggaaca

SEQ ID NO: 297 - DNA, 5677 bp, Homo sapiens
atggcctcccacctgcgcccgccgtccccgctcctcgtgcgggtgtacaagtccggcccccgagtacgaaggaagctggagagctacttccagagctctaagtcctcgggcggcggggagtgcacggtcagcacccaggaacacgaagccccgggcaccttccgggtggagttcagtgaaagggcagctaaggagagagtgttgaaaaaaggagagcaccaaatacttgttgacgaaaaacctgtgcccattttcctggtacccactgaaaattcaataaagaagaacacgagacctcaaatttcttcactgacacaatcacaagcagaaacaccgtctggtgatatgcatcaacatgaaggacatattcctaatgctgtggattcctgtctccaaaagatctttcttactgtaacagctgacctgaactgtaacctgttctccaaagagcagagggcatacataaccacactgtgccctagtatcagaaaaatggaaggtcacgatggaattgagaaggtgtgtggtgacttccaagacattgaaagaatacatcaatttttgagtgagcagttcctggaaagtgagcagaaacaacaattttccccttcaatgacagagaggaagccactcagtcagcaggagagggacagctgcatttctccttctgaaccagaaaccaaggcagaacaaaaaagcaactattttgaagttcccttgccttactttgaatactttaaatatatctgtcctgataaaatcaactcaatagagaaaagatttggtgtaaacattgaaatccaggagagttctccaaatatggtctgtttagatttcacctcaagtcgatcaggtgacctggaagcagctcgtgagtcttttgctagtgaatttcagaagaacacagaacctctgaagcaagaatgtgtctctttagcagacagtaagcaggcaaataaattcaaacaggaattgaatcaccagtttacaaagctccttataaaggagaaaggaggcgaattaactctccttgggacccaagatgacatttcagctgccaaacaaaaaatctctgaagcttttgtcaagatacctgtgaaactatttgctgccaattacatgatgaatgtaattgaggttgatagtgcccactataaacttttagaaactgaattactacaggagatatcagagatcgaaaaaaggtatgacatttgcagcaaggtttctgagaaaggtcagaaaacctgcattctgtttgaatccaaggacaagcaggtagatctatctgtgcatgcttatgcaagtttcatcgatgcctttcaacatgcctcatgtcagttgatgagagaagttcttttactgaagtctttgggcaaggagagaaagcacttacatcagaccaagtttgctgatgactttagaaaaagacatccaaatgtacactttgtgctaaatcaagagtcaatgactttgactggtttgccaaatcaccttgcaaaggcgaagcagtatgttctaaaaggaggaggaatgtcttcattggctggaaagaaattgaaagagggtcatgaaacaccgatggacattgatagcgatgattccaaagcagcttctccgccactcaagggctctgtgagttctgaggcctcagaactggacaagaaggaaaagggcatctgtgtcatctgtatggacaccattagtaacaaaaaagtgctaccaaagtgcaagcatgaattctgcgccccttgtatcaacaaagccatgtcatataagccaatctgtcccacatgccagacttcctatggtattcagaaaggaaatcagccagagggaagcatggttttcactgtttcaagagactcacttccaggttatgagtcctttggcaccattgtgattacttattctatgaaagcaggcatacaaacagaagaacacccaaacccaggaaagagataccctggaatacagcgaactgcatacttgcctgataataaggaaggaaggaaggttttgaaactgctttatagggcctttgaccaaaagctgatttttacagtggggtactctcgcgtattaggagtctcagatgtcatcacttggaatgatattcaccacaaaacatcccggtttggaggaccagaaatgtatggctatcctgatccttcttacctgaaacgtgtcaaagaggagctgaaagccaaaggaattgagtaagacaactgctggaagatgtcttaaatcaagctttcaaaaaaatatattttaggaggctgatttaatgccagtctaaatccttatgtagaaaggactttgaaatttttcttctcaagaaatggtttgtataagaataacaatctgctagtctgtcatttctggagtgatacttttttttttgagacggagtctgctctgtcgctcgcgctggagtgcagtggcatgatctcggctcactgcaagctccgcctcccaggttcatgccattctcctacctcagcctcccgagtagctgggactacaggcgcccaccaccatgcccggctaatttttgtttttgtatttttagtagagacagggtttcactgtgttagccaggatggtctcgatctcctgacctcgtgatccgcccgcctcggccttccaaagtgttgggattataggcgtgagccaccgcgcccagccctggagtgatactttttatggaagacaaaagccccccaaatctgtgtaaaatctgctgcaaaggtgtcatccctcttgtgtcatcactggggttagaggtgggtccgaaataatcttctgtgtccttcagttggactctcggctgccaattgatctctttttcattgccatctctggggtggttctttggttttttgtgtgttttccccttcatctctacctgtgaaagtgaaattctattgtaaatgggaggaaaaagggttggttgtgaaaaattaaagacccacattctgctttcttactcatggtaagaaaagtggccatgagtagagattgggcaagcattggtaataaatggaataagactattattattattatttgagatggagtctcactctgtcacccaggctggaatgcagtggtgtgatcttggctcactgcaacctccacttcccgggttcaagcgattctcctgcctcagcctcctgagtagctgggattacaggtgtgtgcctccacacccggctaattttttgtatttttagtagagacggggttttgccatgttggccaggctggtttcaaactcctgagctcaaatgatcctcctgccttggcctcccaaagtgctggaattacaggcatgagccaccacacccacacaagactatcatttttaatgaccaagagcctagtatatagttggtgcctgtcttagtctgtttgtgttgctataaaagaacacctgagactgggtaattgataaagaaaaaggtttgtttggctcacaattttgctggctagaaggttgggcatccggtgaaagcctcaggctgcttccattcatagcaaagggcagccagtgtgtgcagaaatcaaatgacagagaggaagtgagagagagaggtgtcggggaggtgccaggctctttttaacaagcagttcttcaggaactaagagtgagtcactcccatgagaacagcaccaagccattcatgggggaatctgcccccatgacccagacccctcccgttaggcttcacctccaacactgaggatcaaatttcaacatgagatttggaggaggtcaaacaaactaaactgtagcagtgtttcataaaattgtttgcctgactcaggttgctagtaagccagcagagggatatttgcctcctaaatctttggcagaggcaggagtaaggaagccatttctggagtccttgctactaatttggaaaactgagcttctttctttcattgctttttcccttaagagacaagtccttactatattgccctgtctctcaagggaagacatcaagactggacttgaactcctgggctcaagccatcccccaaccttggcctctcgagtagatgggattataggcatgtgccacggtgcctgacttgagtttcttattctagaacacttggagcctgaactctgaccaggcccctcacttgagcctttgctttctgctccttgtaaactgccatattgggtgcacttgccctgccacagtaatgctatatatttctgagcattgtttttctctagataattttatatttttgagtataccccacttccaagtgttttttgttttgttttgctttgtttttgttgttgttgttttgagacagggtctcactgtgtcccccaggctggagtgcagtggcacaatgacgactcactgcagcctcaacctcctggggccaagtgatcctcccacctcagcctctcaagtggctgggaccacagaagtgcaccaccatgcctggcttttttttttttttttggtcgagatggggtgtccctgtgttgcccagactggtcttgaactcctggactcaagggatcctcctgtcttgggctcccaaagtgttgggattacaggcgtgagtgaccatgcctagctcacttccaggtttaacagacaaaataaacttactctagtttccatctctatcattttataataaccgtagcccacattgtagtagtttttcagctctttactaagtcccaccaattcatgttttcacccttaaaatctttctcactgatactctctctggacagaaaaaaggtgaaataagcctactataaggaatatatgacatgctaaattttatttttaaacggttcttcaagtcagattaaagtaataatagcaaattatgtgattatccatgtcccagcctctctccaaaaaaatagtaaacaagatgtcttcttcttttcccaaagatacacatacacacatgtacaaatttttttatcagataataatagctaatatttaatgagtacttaccttagtttgtcccctttacaacagctttacatctgtgtgattgatacagttcatattcccattttataactgagaaaactggtgcacagagaggataagcaacttgccaaaggtcacacagttaataagtggaaatgctggggtatgaaccaggtagtctgcccccatagctctgccccccagagctgtactgtctcccatgagggtacttctccatggagcagcctgaggcgatccctttattctgggcttctctcagaaatggattcccacacagtattcaaagcaaatttccccagaggaaatcctattggaagaacttaaaaactcagaatctttttctttgtccagagagttgaggaagcttaagctaaatgatacatgtttttaaaaaaaaatcagattataaatttagtttttggtgattcattaaattctttactattatagttattttctagctgttcatcttttagctaaatttgttccaaagaagcaaaagtttggtttctactaagttctggattctggatgggagattgcactgtgtgtgacatgcaagtttcatggtgtgggagattgcagagcatttgggttactgcttttactctttggaagctgttatcatctgtatctgctttaaataaagttaaagatttggaaca

SEQ ID NO: 298 - protein, 734 aa, Homo sapiens
MASHLRPPSPLLVRVYKSGPRVRRKLESYFQSSKSSGGGECTVSTQEHEAPGTFRVEFSAAKERVLKKGEHQILVDEKPVPIFLVPTENSIKKNWQISSLTQSQAETPSGDMHQHEGHIPNAVDSCLQKIFLTVTADLNCNLFSKEQRAYITTLCPSIRKMEGHDGIEKVCGDFQDIERIHQFLSEQFLESEQKQQFSPSMTERKPLSQQERDSCISPSEPETKAEQKSNYFEVPLPYFEYFKYICPDKINSIEKRFGVNIEIQESSPNMVCLDFTSSRSGDLEAARESFASEFQKNTEPLKQECVSLADSKQANKFKQELNHQFTKLLIKEKGGELTLLGTQDDISAAKQKISEAFVKIPVKLFAANYMMNVIEVDSAHYKLLETELLQEISEIEKRYDICSKVSEKGQKTCILFESKDKQVDLSVHAYASFIDAFQHASCQLMREVLLLKSLGKERKHLHQTKFADDFRKRHPNVHFVLNQESMTLTGLPNHLAKAKQYVLKGGGMSSLAGKKLKEGHETPMDIDSDDSKADPLKGSVSSEASELDKKEKGICVICMDTISNKKVLPKCKHEFCAPCINKAMSYKPICPTCQTSYGIQKGNQPEGSMVFTVSRDSLPGYESFGTIVITYSMKAGIQTEEHPNPGKRYPGIQRTAYLPDNKEGRKVLKLLYRAFDQKLIFTVGYSRVLGVSDVITWNDIHHKTSRFGGPEMYGYPDPSYLKRVKEELKAKGIE

SEQ ID NO: 299 - DNA, 83517 bp, Mus musculus
  misc_feature (1)...(83517): n = A,T,C or G
gggcggccgccgccaccatggccacgccgcgcgccccgcggtggccgccaccgtcgctgctgctgctgctgctgctaccgctgctgctgctgccgcccgctgcccccggggcgcggggctcccttccctccccggcccatcgaacactcctcccggtcgcgggaccgctttcgccgcctggcgccggacatacggcccccggacccggcgtcgcgacccggcggggacgttccggccgtgtccccagaggcgtgagcgcgggtgagtgagagtctccagcgagggtcagggggcgtgggcgcttcgcggctgccccatcccggccgaggctccgtggaccctcgtgggtggaaccctgagggtggcccaggacggagaaacgctgtccctggccactggaatataaaatgttcacatgcattccctccctgtgctttggaagaaaactctctcctggattagcccacacccttctcacttttacaaaacgaagaccccaaagagcctctcacctcgtggggagtggtaacttctggctgttgtccctcggtttcagcccccaacccccagatttagaactggtctctcctggtctaaagcctgactttccagtataagtaaataacggatttcggagtttggaatgcttctagtacttaggacttcataaaggacaaagagtgcgctttaaaacaaagctacccagttaaccttaggagcagggttacttgggatggggctgggggcgctgcaaggtcaaacccctggaagccactgactggctctggactgtcctgggccctttcctcccccagccagctgcttgctgtgcaggcaggcactgcctgtcctggtcacagaatggggactcagctcctgtgcctgcctcctttgtttctagttcctttttctgttggaagaaaatgccacggcctgggtgggattctaatgtaacccccacacgaccttggctgtgtctcatctttggctctcagtttccccatctgtggaatggaggggccccattcctccctgcctccaagtgacaagaggtgacaaaatgaaagtaaaaatagtagaaagtgctgtgaaccaaaccagcctaggtgatgttagccatttgtcctcccgtaagaggcagagggcacacatcgggctctgttgttgccacactgggactgccaagattttgtccagtttccacttcttgtctgtctgtctgtctgtctgtccatcttacatgttttacaaactttctcccaacttgctcatccttagaacatagaggtactacttcctagaattgaataagagaaacttttctaccctcataaagcctcatttgaaccataatctcccctccgcagactgccttagccttgtgaacttctgagtcactggtccaagacagggaaactgaggaagggtgaataaagggagggaaagctgtgctgaaggtctttacagacatgctgtgcagccccaacttccataatcttgatgactgattttcagagaaaggaattgagaactttgaagacatttactgttctagatacagttgtgtgtaaggaactgataactcagatggccacctgggaacccaaggcaggtgccactaactggtactcaggctgaaggctccatcttgtgaggggctatgaagggagcagggatgctgggctccagcttgaggctggcacaggaatctccttccaatggcagagcctgttccaggctcacacaggtgtgagtgtagcatcaggctatagtagcacctgagttaggggagataaggtaagaataggggccttatgagagccgggccttcacagccatggtgctagaactgctctgttctgttcgtttggggaaaagcaggatagaggcaaaggaagaacccaggaaggaacaagaataatccagactttcttttaaggtttcctgatctctattgctctaaggcccagtctggggcagggggtgtttaaaaggtaaagttagaagaggtgcactctatgacctgttgaaaccttcgagaagttatcagtgtggccgaagatctaagcactgcctctcaggtttctgttagtgcctcaaacgatgtcacataggaaaaggacacagcaaacaagcagctacaacacaacaacaatcagcgacctcagggagccggagttttgtagcaacctcttaaaattttcctggcccactttgatctcctcccgactccccgctggccattacacactgctaggccctcacatctgcagaaatccttggtggtccttttgcagatatccagcctccctgatacccgggcagatggtcacccatgctctgcatccactttttttttgtttgtttgtttttttttttgtgtgtgtgtttagggagatgagtgttcttgatggtagtgaaccttgagtcgcacaaataatacccttaagctgacagttgggtcccctgagccacttcttctgggggtgctggtggccagtgcctggtcatcacggtctgggcttccaaatattccccagtgagtagcagagacttaattcttctcagagggtccttctagctcctctctccccagagagttcaaggttcccactgctgggtggctgtgtttgcattccatttgtgggctgtttgcttgtgtcacactgtcctccagggagaactgccccctgtttgtatagccattatttggcttttgtgacccacctgtcaccgggttccactgtgtttgccgcttcagccatcaatgaaaagagactgagagctagagatttcctctctctgtgttggctttcctatgactgagggtcccccagagccatcgctccgggctgagaactaagtttaatttttcagtccacaggccacactttcattgtgagagctgcggggcggggaggtgggaaagaggctggacttagactgagaatcctccgaaagaacttccccacccgaaggggaaatggtgctgctgccttgttaaattaagcagccagcccaaggaataataatcttacagaaatgtggttccctaaaggaagagagccatgagcccagccccttctgagctgttaaatggtggttcctaaattgctctaactttgtagcccaacttcatcctttagctaggctgccacagtaccactgcaaggtgctatgaaggctggctggggaagaaagtgtgaccctcctggctgaggctgagagatagatctgggcatctagaaaccgcttctctgacagaggttgtcacaagtagagagagagacttggtgctgaaaagccacatccttttcaccttgcctctctcctggtgcgtgcagatgctgagctcatgttttctgctcaccagctgacttgtgtgtggacaaggggagacttcactgtgcccatgccagctgggcagttactgcctcctagacccagaagcaagggcaggagcctctctgccttccagtgatctctctgtttccactggtgctggccagctgtccgagagcatccttattcagggtcagaaagaaggaagcagcagatggtagttgctgtgttcttagctactccttatctactttagcatcttccctctgccccagtatcctctctgtatgagcaggacacttgaactgctatcgatacctttcatcgaagaatcctgcagagacaacaggaaggcaactaactgacatccctcttagaactcctagcctttgaacacctgtgtgcggtcagaacacatatgttattttaccccatttcaccctcaaagtcctgccaggggtattgcttctcattaatctccctttatgggagacgaaacctagcaaggttaggttacagggaaaggaaggaaactgggtatgatttcaatcaaattcattagcccatctcaccacgttatgaggtctctgtttctcatctgaaggacaggaaaaccttgttatagacccttaggaggctctccggctcaacatcctggcgtgaagttggggaccctgactagaacgaggtggcaatcaagatgttgacaggagagagcttttccaaaaataatttctaaggctggagagatggctcagtggttaagagtactggctgctcttccagaggaccggggttcaattcccagcacccacatggtaattcacaactgtctgtaactctagctcccaagggatctggcaccctcaacagacatacatgcaagcctaacatcagtgcacataaaacaaaacaaaacagaaaaaccacaaaaatacacaaaaataatttcaaaatatttttaattttaagtgtgtgcatgtttgtgtgcatgtgtatgtgagtatgtgtgtgtgtgtgtgtgtgtgtgtgtgtgtgtgtgtgtgtgtgtgtgcatgcatgtgtgtgcaggtgcctgtggaggccagaggcagatggttgtaagctgcccagtgtgggctcttggaacagaactcagggcctctgaaagaacattgtacactctgaacctctgagccatctctccagctccaagagagaagattttaagattattttaatgagcagagggattgcccatgaaagtgcttaagtgtataaatgtatagaatgatgtcttatattgttattatgatacacaacatgcatatgtatatgtatatgtatatgtatatgtatatgtatatgtataagtatatgtatatgtatatgtatatgtatatgtacatatacacacaccaatccatagattacaggtgcctggggtagctcattcgttttcactgatatgaagtgttgaattctgtgggctctgggctgggaccatggaacagtgactaacattggcaattgtcagttgctctctcagcacctgctctgaggaatgaaaatgcattcagaagttcctcccgtcacttccattttaacatctgcgcaactcaatattcattttcccatagacgtgaacaaagagacttctgtcctgtcttttctcccttccttttgttagagtatgacagatgtctccctgcttctaaaaataatcctaaaaattctaccctctctggactgggaatgtggctcagtggcttcaagtgcatactgctcctccagaggacctgggtttagttcccagaatctcactgggcagactcacagctactgtcacttcagctccacaggaccattataatgcttctggcctccacaatcacccacactcacatgcaaacacacacacacacacaactaatttttttttaattttttaaaatctcttctccgcaggttgtcggcatcttggttgccatctcttctaatcatgatcccagagatccatatcttatttgattggtttataaatcagaaaatacttattaaagccttaccctgtctggagagctttgtcaggtgacgtggaggttgtaggcacatctgtggtgtccccttcctccccagggatgatcttgctggagcccaactgtcaaggatataaaacgtgggacaacaatatagtaatgattcgtaagctaagaaagatccacgttggtaccgaccaaagggatggtatgggcagagcaggctgtggtatggaagtgtacactataggggctgcagggtgagggacctcatgaggaaggaggggggtgcgatgagttttggaaggttggctaggatgtgagtggacagatgtggaaagactttggcattagcagaatcttacatgttgaaaagctcaaggctggtttcttcttttgtttatgttttttgggggcttatttttagttattgtccagaatgatggcttccctgtggcattttctgacatgcgtgttatatgttgctcgtgtttctctcctgttcccctcgcatccatcccctttctaccctcccctagtcctcactctgttttcatgccttctactgcgtgtgcgtgtgcatgtgtacctatgaacataggtcgcacaacactcgtctttgtctttctgagtctggctcatagcgctctatgtgcgctccagttccgtgcatgcctctggagtatcttcattctccttggctgaatacatatgtacgtagataggcagcaccttttctttatctgcttcctattgacagccgtctaggctggttccatattagctcaagactctacgtagaggttatcatcagtcaaggccagaggagagaagatgtggggatgtgaattgggatttcgaaattatcatagaccacagcctgggaagggagctaaggctgttacagaagggccttagaatcctgccctgtccatgtaatggagccacaagccttcgtggccttagggaagagaccagtgtcttttgtgtgttcatgtttacttgagcctggagatgggccttgctgacaacccctggcaggtctctgcctcacttcagcccagaaggtattccggagcttgtgggaggaaggctaagaagtattaaatccttgagtttgggggaatgggctaaaatcaggacagggctggagtagaggctgtgggaaatggagggtgagagagacaaaggcctttcagggggacaacaggagagcccaaggctgccagccaaggagatgctgggaggggagaagaggggaggggaggggagagcaagggaggagggggannnnnnnnnnnnnnnnnnnnnnnnnnnnnnnnnnnnnnnnnnnnnnnnnnnnnnnnnnnnnnnnnnnnnnnnnnnnnnnnnnnnnnnnnnnnnnnnnnnnnnnnnnnnnnnnnnnnnnnnnnnnnnnnnnnnnnnnnnnnnnnnnnnnnnnnnnnnnnnnnnnnnnnnnnnnnnnnnnnnnnnnnnnnnnnnnnnnnnnnnnnnnnnnnnnnnnnnnnnnnnnnnnnnnnnnnnnnnnnnnnnnnnnnnnnnnnnnnnnnnnnnnnnnnnnnnnnnnnnnnnnnnnnnnnnnnnnnnnnnnnnnnnnnnnnnnnnnnnnnnnnntggtgagcacccagtctagatgacaagaggaagaagcagtgacccaggcaccagccagggcggggaggcacagtgggaagtggggtggtttggaaactggctgtggtcggaagaacacttcaataccatactcaggatagccatgaaacctggaggctctccctctacctgtgagaataagctagcgcgtttctgctgacacatcctttgcccttgttagatccaggttagcgtgagcagggagactggggaggaagtggctgggcagctaccactccgttttatttgagctgtttagttgggacgggtagggtgtaaagtgaagcctgcgtgtggcatggtgagtgtgggtggcatccgatgtggtatccctgtagcagattggtcagtgaaatggagaaagacaatcagaaagatctacacttgatcttagccaaaaggccgagaagcgatgatcagaaagatctagtgcccgctgattctcccctgcaagccgaccacccatgtcaggagcagcacccacctacttaacccagaagcccgatgtcaccctctacatgtcttcttccttggccttctacaggctgattgtgcttctgaaatacaccaggactctgccctctgtgtctcccttgccctttccgttcaccccatccactctttcccactaacggatgctcaggaaagccacagtgatcttcttaaagtgtgattcaggtcacccgattcttaccttaaaaccgctaatagctctgcagggcgacactactacctttctagactctgatgctaactaagtccgcttgcttctcagagcagtgttttcttttgctttgctgtttttgaggcagcgttccactatgtaacccaggctggccttgaatttgggatcctgcccccttaccttcccaagtactaggatcacacgatcataaccagtagtcagtgcgtgtgtgcatgcatgaatgtgtgtgtgtgtgtgtgtgtgtgtgtgtaaatgcgaaatttactcctgtcttactctatcttagaggcttgacacaggtgtcccttcctgtagctcccccatcacaaatgcattaatatgtcagtgttggaaggaaggcaggttggctgtgaggactggatcctgaagggccaggaaaactggaacaaggtcacacttcctttgcatgccctagagggactgtagcagggctgtaccccatgctgtagggctaggactaccagatcccttagggaaataaaagaccatctgctaaatccacagaggctgctaaaaacagaagagttctttctgctttatatttcagctctagggtccttgaacttagtagcattatgttaccttttgatcacgtggagttcttgaggaaagcatacaggtgagataacacaggagaaacatgggctatctccgtgtttttccttcctgggactgttggggctagggggcagggtgtaaaggggtgctctgatcttgctcaggaatcctgggatatctctgtgtgaggaaggagccgggcttctggaggtgaagaagtggctttggtaagctgacgtatgtctcctcagtgtttctggtagattgggaggtaaaggccaaggaggaagatgagtagtgtgactcggcgctcaggggtatcctgctaccaccatccttggaagcatccggagtttcaggaaagagtaaaaagtgcgcagaagagagtgctgggctgttgcctggagggatgagctttggacagggttaaagcctctgttttctctccctgggaagtgggaggggttggagtaacttcatttggggaataggcttcattcttagagcctctggagccaccatggcatttattgtcaccatagagtaagacttccagtgtgtgactagagtcctgctacctttactggcatcgaccccagctggtgtccaagctcagtggcagccacttgccaactatgggactttgaaggtttcgcttctttgtaccattgttttctcatctcttaagtgggcaattaaagagcccttcccagggagtatatgggccatctgccctgtcaagcccccagctctgggcccagcaggaaagcactataaatactagaagttcttctgctgctgaaactagggcttgtttgcactgggtacactgtcttactttggtttctgctgttttgggtcaaaaccacattggtgaggaaagggtctatttcatcttacatcttatggtccatcactgagggaagtcagggcaggaactgaaacagactgtggaggagtgctgctcactggtttgctggcctgggcttgcttagcctgcttccttatatgacccaaaacacctccttatgagcagcactgcctacaggtaacctgggtcctcccacctcaaatggtaatcaagaaaatgctcctatacacttgtccacaaccccatcgtctgatggaggcagttcttttgaccagcccagtctgatggtggcagttcttttgatcagcccagtctgatggaggcagttcttttgatcagcccagtctgatggaagcagttcttttgacatctcctctttccaggtgtgtctaggtttgtgtccggttgatgaaatacaatcagcacagacactgttgatagcatcctgctatgcacacagtcgtccactgggtgttttagcggactgggtaccagttctaagagcaagaagctcaagtctgcatcctagagaccgctggccttcctctattccagagctctgccattctcattcatctcatccctagaactctccacccttagccttaaacagagcagaaagagccagattcaaagccagaaaagctcagtgcagccatccctgcctgggacctctgagatgggatgggatgatcccataggaagcgaatgggatgggaagaaaacagtcacgtgaggtggggttgtgcagtaataaacctctgaggagcaggtttgccgctctgtgtgcaatgggcgttctcctaggtgggaacctctggcgggtccttcttttaagcatgtgtatttcatttttaattatgtgcatatgtgcatgtctgttttggtgtgtgcatatattaaacattgtcagactttggggagtcacatgagcagtaacagaaatgctggcctaagtgttgtcccgatgagacttctctgaagaggctcataccctcataggtgaggtttgtggcttgtaggaaattatttatagtacaggcttgccttgtggtcatagagtgctgtttgttgtgtgtggtggccccgtagagagatggcaacggtggctcgaggactctgacatgggtcttagccccttctctgtctagccatgtggccgaggggtggggagtgggggcaggggcgggagcaggctgcttcttagtgtctcagggttatgttaaaaatggggctattaggagcagaagatatggctcagtggttaagggcactgactgtcctgccagaggacctgggttcaaattccagcacctacatggcacttacaactgtctataactccaagatctgacactctcatatagacatacatgcaggcaaaacaccattgcacattaaaaaaaaggtaaatgtatttttaaaaaaattttaatgaggccattaatatctttcacactccttaacaattgtgactatgatggcacccataaacacagtactgtgaatgaagacctccggcgtatcatttgctctggacctgcccccacatttgtaaaacagagataacagaacccatcctgttgatttcatggttataagcttgaaataaaaccacatgggcatgctttgtagacatgtacacactgtttattattaatgctgtatcagactgttagtctaaggcagggcttcatgaaggttgacatggcaggatgaggagacagtcggaaaggaagaggagaaaaggaatgtttgtagtcaatgtcagcggcctttttaaatgctctgtccctttgtcccttcacttgtctctggctgctgtgaccagtcctccctgtccctctctccctccaagagaggcatccttcacatctcccttggccttcgggccgcctccagcttaaccccaggggttgtttgggcagtaccgcctgtgagctgtagaatctctgaaaagagccatgggattgcgaccagagagtcggaatgtggtcaggttggtgaaagttgtctcccagggcaaacgtgtggccctaagggagaagagctttatttctgggtgcttctggtgttgtctctcaatgggacgaggctctggagaggcggttagttctgaattggttctaagaaacagccaggttttgctagaaggcaggaggaaagcagataggacatgctaggcagggagagctccaccggtcttcaggcctatagactctatagggcaaagannnnnnnnnnnnnnnnnnnnnnnnnnnnnnnnnnnnnnnnnnnnnnnnnnnnnnnnnnnnnnnnnnnnnnnnnnnnnnnnnnnnnnnnnnnnnnnnnnnnnnnnnnnnnnnnnnnnnnnnnnnnnnnnnnnnnnnnnnnnnnnnnnnnnnnnnnnnnnnnnnnnnnnnnnnnnnnnnnnnnnnnnnnnnnnnnnnnnnnnnnnnnnnnnnnnnnnnnnnnnnnnnnnnnnnnnnnnnnnnnnnnnnnnnnnnnnnnnnnnnnnnnngatggtcacaggtttaaacccacaggtagcagttacagatgcgatgtgacatcccttctacccagctcccctaattgctcttggtggcccttcctccatctcccacccatctgaactgccatcatttctgtacttgacttctctcacctgccagtagttatccaccaactcttcctcgctccttgccgccatcctcttccctgcaagtcccagtggaacacaggctcccctcatctgtgggccacacagagcagcatcctcctttgggctataaaacctgtctagatcccagtgtccttggtgacccacccttggagcccacctaggggaaacctgttggtcctatttgatggaagtgtgacctccccactcctcttaaagaaacttcttagcaagctgtgtgtggcagcacatgctgttagtcccagcttgcgacaagtaaaagcaagaagatccatatgagttcgaggccagcctggtctacagagtgagttccgggacagccagtgctagttagagagaccttgtctcaggctatgtagagagaatttgtctcaaaaaatataaataaagaatcatgcctggtcggggtccatggtggggggggtgtgtcccagagagagctgatgactctgttccccaacccccttcccgcctcctcctgaaccctgtgtctaccagggtctactccattcattttccaacaagcataaacaaattagatttctaccattccctggaggccagagccacttcacagaggtctaggaatacgttagctgcagaacttagaaaagctccccacaagggctgtgtaaatgttggaaaccctagccccaggtcccgctcacacccaggcagtttcttcctgccccttctcggccctcctctctctccccctcttcctcctcggaaccaggatgttttgccttgcctcttcattgtttcactaacctggcaggtctcctttggtggagccctgccacagcttcctctctgggtgtgagctaacacagggaacacacaggagcagaggcctgctcttgccctgtgccttcctcagctcttggccaggcatggcacaggctgccagactcggcgtccttccaggggtcccccttggctgaggagcctctgccagcagccttttcatgtgtttttcaaaggatgagaggggcagagaaaatgcaaggataggtgcccttccaaaacaaggtagactacccattgcagaaagcttttatgtgttcttatttaactgagtgggagtcttctggccctcgatcccaggactttctcttgaggacacacacgtgctcgcgtgcgtgtgcacacacacacacacacacacacacacacacacacacagtcccatgagttgcttttctcctgaccgagtaggctacttccctccatcgtgatcctcaagggcccctcctggccagttctgtttctgggaggctgaccctagtcttacaactccaggctagtccttgtcctagcctgactgagttcagatctccagatctgtctcttcctgagaggaaaggacacggtagtgaacagctgacaaagactggccctcatgggcagcgagggtggtgtgccttttcaacttgacactcttcgtcaatagagcctgccccaagggactttaaaaaaaaaatcatcctcagacctacgtccaaaggctctgtgatgtgtgtgatttttcttagggcttctccttttaggataagaacaaggaacgaaacaaaggttcctgggagtcctggactatccacatttacggctgagtcttttgttcacacaaactcatttggctcccaaatgtcctccacccaaaatcattacatccgcagcagcagttcaaaacacagcctggagtggccgagctggcctttctggggagattacaaccactttcacacacacacacacacacacacacacacacatatccaggttcctgcctgccctgagagtatcccacccctggccatcctgtctgaaatccccctcatttgaagagttcctgggaaggggaaggccaggagactcctcctggggagggcctcggcagctctgggcagaaggaaggctttccagccccaggttttgccttgcaaactcccaggggcaccagctctgcttcgctgagcttctcacaccccagagggactcagttgacttatttacacagctcagcccttacagcagctctccctgtctgactcatccttgtagcctatggctggtgttcagtaaaaatatatgttctggttttcaatgcggctaaatatacccatcataaaagttaccgctttgaccatttccaagttccagtcaacaatcacaatgtgattgcacccgtcacattcatctgcagagatctctcatcctaaacagaaactcttaagtaatcgtccctggcctcaagccccaagtaacctctggcccgctttctgtctcgatgaagttttcattctaagtacttcacgagtggaaccatacagggttggtcctctcgtgtctggctcagtttgcttatgcatattggtagctgtaggatatccattgtctgcatataccacatcctgttaaccctctcctccactgcctgctttcatctctggcttgctgtggatactgctgctgtgatcgggtgtcagttatctgttcgggtctccgctgtccatccgatgaggtagagacccagaagtgggattgctggagaccatattgctaactctagtgttgtctaagttttgcagggactgcctcactgtttccacggcggctgaaccatgtttacattcctgctggcagcacatatactaaactccagtccgtctacctcttcctagcccttgctgcccctacccccatagtagtagccgtccctatgggagttagagccgatagtttgaatccatacgtgccacttgctggctagacagtggatttagaactgtaattctccctcttgcgcctctgtcctgtcatccaaagctaagacttaaatcgttaccgtgattcctagaggacctcgtcacctttagagaggactagggagacaccaatgctaacctagccctggccagaatgattagttcaagccgggcatggtggcgcacgcctttaatcccagcctttgggaggcagttcgaggccagcctggtctacagagtgagttccaggacagccagggctatacagagaaaccctgtgtcgaaaaaccaaaaccaaaaccaaaaaacaaaaaacaaaacaaaaaacccaaacaaaagctgtagcaagtgacttggacacacactgtcaattaattcaggaggagctgtctgggcttctcttctgggcacacactggttttatctgcgattaattgggaaagacaccagacaaaaaggtgtgggcttgtagcctctgatctgccaccattttcagcgttaacctgccgggtggcttcagggctgtgcctcagtttccccttctattaaagagggaagaattaccctcgtgactgcctactcagaatgtaaggatctagaaggataatttaggcctcctgaattctcctgtataaagtgctttgaggttagggaaatgtgtgggattcttaattggctctcttgggataaaagcataatttcattcttgtgggaaggacctgtgagctctgtgttctgcctctcttccgtaggtggcaatccacaggctaaaagaaccgaaaggggagaggaaaagatctccctcttccttaagacttttctctcctccctatgtgagcactccaattttaggaaaaatattacaattacagagaaactcagtcataagcatgataccccataggtgccaggtgccagacaaaagctctaagggggcttttcaagttcaggatctgggggcagtggggtgctccaatgagagagaagcagggtggggaagttccagggctggggatgagggccacatggctgcagaaggtcccaggaccttcatccttctccaatagacaactaagtggccattctgcaggactggtgctggtggacccctgggacccttcagcttataccatcttcctcttccaaggccctgaaatgacatccttgtcgtctgtgtccctgccgctggcagactgaaatcctttaaatcagacccaatcctcagttccacctacatcccccatctgccatccttcttttttgtcattgatcctaggcattagccagatgtttgctgttggaagtcaaaacatctcctcagcttcacatgttggaagcagacttttcgcgttccccagaaactcattcgaaactcattctccatgcccatgccactctctattgccgttcctttcagcatccgttgacatcatctctgctggaaagctagtttagacatcctcttgctcagtctcctagagactaatctacagctgttggcacagcaagtctggtttcaaagccggtgcaataagacacatttccctcctcttagaaacaaagttgccttaaaacctgaagtttaaaagccagagggatgattttttgttggtttggttggtttggtttgccgccccccccccccccttcagctctaccagccaatgacctgcagcctcatggaatacactggagaaataaagggcttattcttcaactctgccctctaaacacaagctgatgccaggctgcacttgacgtttggccttctgtagggctggatggtgagggtaggggtgagatctccagggggaatcggcttgtttggataccattgctgctcaggagcaaggctagcttaacacacacactcattcactgggatggggacggtggctgagatggggctgggattggaagagttgctgctgaagcagctgctaattaggaaatccgattccaggctgtgccagcttccctcatgaacaccagttcccacacagatgttttagaacattaagatgctacaaaagtggaagttgtcaacttggggggtaaatatccaagcaaagcagtgtgactttcttgttaatttagtctccgttcgtagtacaggggagagttctggactgacacagggggctgagcccagaaggattgcattcttgttcaagggtagctgagagtgcagacacgccagctccagcggttggtgtggctcttgtggctccgtggtcatgggtttgaatgattgtctctgacagagaagctgggctggaaaggtgaatgggggtagctttggcagagcttcccagaggccacctctgatcctaaagtgggaaaagctagaacctaaggcacaaagagacactcaatgacttcttaccgatctaggcaattactaaccacagccagcaggtctcaggccaccaggaatagcagttctgtcccaagctgtatcttgtctctggatgctctggagagatgcccattggcctcttctctatggctggttcactagttatgcccacagctgacatcattggaagctgggcattgggactaagcagcccaccctcaagttatgtcatgaatcctttggctgtggagtcacaagccacgcacatgcttatgttttataaatgtcactggggccccagctcacaccactgcttatgagtctcataaaccaactttgtatttaacggctacagatcacctaccaaggggacagtttagggttcagttgaaggcattacaaaatgacttttccagatctccagtctctgtgtcaagataccagatgtgttagttgcttttctgttgctctgagaagacaggactgagacaacttagagaagaaagagttggtctcagcttgcagtctggacggttagagtccgtaatggtggagtcagcatggtggcagctgagaactcacatcctttgctgtgagcacaaaacagagcaaactggaaatgccaagagaatttgagctttgaaagcctgccccagtgatgtacctcctccagcaaggctgtgcctcctaaacctccccagacagctccattccctgggaaccgagtgttaaaacaggggaacctgggaggctacatcgtgagatccagactggactaggctaccagcatgctgtgtcttagccctcctccgttagcttctatttttaataagcctacatatgctttaaagatagaatgaatttttacaaagctgtagtgaaacttctgaccactgttagttgatatcatttagaattttgtccctatctattaacttttattttgttttggagtgatgcccactaatttctctctacagaaattttatgtccttccaagggctaccagggtgggcgtgacacattctaattatgcttagggttatcgtgaggccctgtcaatggagttacccttcagcaccaatgagtctgattctgccctgcgtgctcttgttagccaaggtttattctactgtaataatctcattaattaaaaacttactgtatttgcaaaacacatgaaactcaagaagaatgaagaccaaagtgtggacacttggccccttcttagaattgggaacaaaacacccatggaaggagttacagagacaaagctgagacaaaaggatggaccatctagagactgccatatccacggatccatcccataatcagcctccaaacgctgacaccattgcatacactagcaagattttgctgataggaccctgatatagctgtctctagtgagactactccggggcctagcaaacacataagtggattctcacagtcagctattggatggatcacaaggcccccaatggaggagctagagaaagtacccaaggagctaaagggatctgcaaccctataggtggaacaacattatgaactaaccagtaccccctccccccccagagctcgtgtctctagctgcatatgtatcagaagatggcctagtcggccatcactggaaagagaggcccattggacttgcaaactttatatgccccagtacaggggaacgccagggccaaaaagtgggagtgggtgggtagggtatgggggacttttgggatagcattggaaatgtaaatgaggaaaatacctaattaaaaaaaaatactgtttctttagatgcacgcacacgtttcccttgcgtgttgaatcgcctttcttctggtgtctaggattgctttcttgcttgaaatcaaacctcagtcacttcttttagggttaagtcttaaacctgtgacaattggctgacatgcccattaacatatcaaagctgaaattggccatcaggttctcccagcatccctcagtccctacctattacaggctatggctggcataccctgccccatacttgaactctccagcccaggggctaggctgccctcccccgccccttcagctgcttttctctatataatatagctattttggttacctgttcttttggccagtctcttggctcaggccacgcatcttgatgggcagttcctcccactctctcctcacatggccagctcagtctgccatgttcactctggactctcccagatggctctgcctctgtctgtgtgatgtctctcccttacatctataagaaaaacatcaaccccttaggagcactgggctccttctttctctttttcactcaggatggagggcacttagctcacctttgagtgagaatcattttacttgattctttcatggtacttctgaaagatggttttgctgcggatgtgattccagctgctctcttagcacattgcaaaggctgctctactgtcttttctttgatttcctttgtagctggtttacctctatttgctctttttcttctggcgaagacttctgtgagtttctacaggttcactatgatattaacacacacacacacaccaggacttagcttaaagatctgtgcttttcattggttctggaaatttctctgccattatctctgtgaatattgacctttggcttgacccctctcctcccatagaactctatttagaagctggagacatggctcaaaggttaagagaaattggtgctctttcagaggacctgaatttggtcttcagcacctatgatgggcagcttacagctacctgtagctccaactccaggggagcctatgtactcttctagcttctagggataaccacacactcaaaatccccacataaaatatatgtccatatagaatgtttgcgtggctttgccaggttccccaaggcactgtcaggtccactccttgtctccccgttattcactgatgtgtgaatgctagcgatctttaagtcaccttttagatcatctttagatctctagctcacctttaaaagatgcggtcttcttcagtgcatgcgcagggcttagcaccactctccaggacacctgaatcatacagggaatgtgcatctgtgctgctcactcagccaagattagctttgtggttacagcctttatggtgaggttgcttttagctttcggcttaaaccaagattggctggctgggcttcctctaagtccctctgtgggtttgtttccatttgccttttgtccagggtcgagtccttccgattccaacctggtacagtgtttccctttgagcctccttgagagttcacgcgttctaccgctgtcagccctgccttcctcgaaaggttgagatgttgaatggatgtcggcttcagtctttgctcgcctgcctctgttcctaggcttggctgggtttgggcctcaaaggatttgattctttcccgatgcaccagctcagaagtgcatttgggatatatatagattacatctattttattcaggatttttagctgttgatcgtggcaggattattgaggacaccgcaggggactattgtcaaccatgtagttttatttatagagtgcattttttccattcttacatctttagtctgccctcggggagatagcatggttgcgtgtgagcagtgctttgccagtggccactcttcctacagtgaattccttcagctgacaggggtctgggatctccactcctgacctctgaagaaggggctagcactccttctcctgcgccagcctcacttcccaggctcgggcctcctctgccttttttataagctctaatggagctaaggtcactatcttccttttgtctctggcgtcccagccttgggacatccctctctctgcctttctgtaagtcttttttttttccttctgatttcctttgagagtaatttttcttattgtgtcccaattaaccaaaagggtagagaaagcatccttccacccctgtgctttgtcagtccttttgggggaagccatgttcctctgcagcagcccaggaagaagaagacaagcatacccggtgggcggctgcattcataaccttagagactttgtggtcccctctggcagctcctcccacatccagctcgtagcctctcagcaggctgcgcccccagaggagcccagaggccctagtgatttccccgcccctccaggaagcctctgctaattatcacctccaggaaagagtcaagccatgaaaacagtaattctcaggggacccggaaaggaaataactcccttagaaagttctcagcatctcagagggcagtttgtgtcatcaccacccaacccacctcaaataatccagtcgctggccactgccgcgtagctggccaatgcagtgtagtgaggtagctgcagccacgcccgaccgtagttattgaacccttaaaacatggccagtaaaggactgggggatagctcagtggttaagagcactggctacttttccagatgacctgggtttgattcccagcacctaccagtgccttcttctggtctctgagggcaccagacatgaaagtgatgcagacatacactcaggcaaaacccacacacgtaaaggggtagggaacagtgaaatattaactggacttcaagttcagtacaaaaatataattaccatcatgatacttcaagtttatattgaaatgatattttgaatatgttgaagagaataacatttccttttttttattttaatatatatatatatatttaaagtggcaacaaagttggttttatgggttgtgagttttgctcactttatcttctgggcaatagtaatctaaaagataacttgttccttttttttttccccgtggtttgttctatttagatgcaaatgatagttctgcctgcctgcaatctctgcttatcagatgctttgacattttttgcccgggcatataaagatagaagtgacttcattcactccccactgagaattttccatggtgccacagcctgcaagcacaagcacaaagagaaatattctcaaatcaggaaaataaaaatgggggggagccgggcggtggtggcgcacgccttaatcccagcactctggaggcagaggcaggtgaatttctgaggccagcctggtctacaaagtgagttccaggacagccagggctatatagagaaaccctgtctcaaagaaaaaaaaaaaaaatggtggggtagcagttataaagatttaattttttaatgtgtgtgtgtgtgtgtgtgtgtgtgtgtgtgtgtgtgtgagtgtgtgtgcatatatgcaatgcaagtgtgtgcaggtgccctcagagaccaaaagagggcgcccgagtccctggagccgcaggtgttgtgatccactggatgtgggtgctgggctggactctctgtaggagcaaggagtgctctttagtgaggcgccatcaccttaacccctaaatggagtttgtaagcagtcacgcggtcagcaataaactccgagggtcattttggtgtgctgaagatttcttcgggtttgcttttcaaaagccattgagttttcagtgacgtgtttgttatttcagccgctgcaaggaaccgttggctggaaagtaacaaccccgaaccccatataggatgcagtccctcttatcagagtcaagaggaccattcaggttccagaaagggagtgacagctcagaatgctagaatgagccacagttcctcagaaggcccagaaaacccccctctcctccctgagacaagtgctgagtggagcaacatggcttcctcccacagagcggacatcgctggtctgcgccgtggaccctcccctgagatcaccacggcgccaactgcccacagcagcttgttgtgtgagtgtgtgtctttttttttttttaaagatttatttatttattatatgtaagtacactgtagctgtcttcagacactccagaagagggcgtcagattttgttacagatggttgtgagccaccatgtggttgctgggatttgaactccagaccttcggaagagcagtcggtgctcttacccactgagccatctcaccagcccggtggcacatgttttgtttgtttgtttgtttgtttgtttatttattgagtgtgtgtcttgatgctcattcatggatgtccagtccttgaaaacaaactctctgccccatcccctccccaccccacacacttccaaagcaactgtgtccatgtagaggttctgcattggggtgcattagacaagtcctcctcagagcccctcttgtaaagtcagaccagggaggaaggtgcagatttgttgaacatactggtttgtccttcgacatctatgctccatggcagtataaattttcacctcctgcctcctgcccgggatcctgccacacagtcatgtgtcccaggggcggtgggaaaggaaggctttgtttgtgttgatggagtttgagtggttcttgctgcttcagtctgcacaatctgtagcttaggacttcagcgaaggacttgcagttctctgagtgcagctcaacccaagaaggaagagaagaagtgtagtgctaaccaggcacacccctacatagcaacaagcccgctccccaagtccttccagcagcctggtgaggtcccggtcattctcgctctgaggctttggaaactgaagctgcccaccgagaatttcccccaatgagaatagtgggcagacaagtcaacccagtgtatggaagcaggcagcagggttccaagtgcagaaagcccaagtctgtatgttggtgagcgagcgagcactacagctgaggaacggcacgcctagagtgagcagtgatgtaaggacacaaaaacacgtggcttcctgtggggcatccgtgccagcatcctcaccgggagagtacagagtagtgggcagacggctctatgcgtgcgggttaggcacaggatgtttgcaagccaggcagtttttacctgatgtggtgggaagactcactgaagggtttttgaacagtggagtgatagtgttaacagtctgagggaggtgccatctggcagccagcctgtaaggtgactgatatgggagtaaaagaggacctgaagtgagttgaactatcaggtagacatctagacagtgggtgctggctgaccaggtgactaagagctgaagaattgctcagcaaagagtcttcacaaaggaagggcaggagaccttgcacctaacaggcatagagccctggattcagtccccggcaccatataaaacacccatgcattcccagaattcagaaggtggaggaggcaggagaatgagcagttcaagattgggctggagagatggctcagtcgctaaagtcacagaggagccatcttcagttcacagcacccatactgaatgtctcaaagccacagtaacttagctccaggggagccaacgcctcttccggcttccataggcatacacatgcatactcgagtatacatacataaacacacacacacacaaataaatcttttttaaaaaattcgtaaaagtcatccttgaactgaaccaccgaccaaagagcatacacgggctggacctaggcctccctcacataggtagcagatgtgcagcttggtcttcacgtgggttccaaacaactggaacagggactttcccaaaagcagttgcctgtatgtgggctatgttcttctaactgccttgtctggcgtcagggagaggggaagcccgtagcctcccagagacttgaagtgccagggtgaggggtatacccagggggcacccacccactcagagaggaaggggaagggacatgggggaaggattgtaggagggggtgaccaggtggggagcggtaaatagaaaaaaaatttaaaggttatctttgagtttgaggccaggctatgctacatgagacccccacctcaaaaattaaagtaaaagtaaagatccttaagccaggcacaatggcatgtgcctttaatcccagctgttgagaagcagtcaggatccaggctggcctagtctacagagtgggttctgggacagccagggctacgcaatgagatcctatctcaaaaaataaataaataaataaataaataaataaataaataaataaataaaaacaagtaaaacagaaaaagattcctatcaaaagaaggaaggtggagagctggtaggacctcaggcagaggttgaagccatcgaaagtgactccctggtttcattctctgtgaccgtctaggggcagttcgttccgtaggggaaggcatgaaggcattttatgttccagccattcatgaaggctgtagagctcagaagccctacggtgatactctatggtttggctcattgtccagtgttgggaattctgcatgttttgaattctggtacttcctggcgcccctcgtgaaggtgaggaataagtcctcatgatccaagactgatcgctaaattgtagaatagtggttctcaaccttcctaacgctgcgaccctctaacaaagttcgtcacgttgtggtgaccccaaccataaaattatttgtgttgctccttcataactgtaattttgctactattatccattttaatgtaaatatctgttttctgatggtctgaggtgaccccctgtgaaagcattgtttgacgcctccaaagaggtcgagacctagagattaataaccaccccaaaatagtctgaggcttggcagcagctgactcctttactgataatctttcccctgagggccgatcatgggtgaggtcaaaaggcaatctttggaggccagcctggtctacagagtgaggatagccagggctatacagcgaaaccctgtctcgaaaaaaaaataaaaccaaaccaaaccaaaccaaacaaaacaaaacaaaaaagacaacctttggttggtggtctctcttgcagttccctagtttcctaggatgggtagttcttcctgccttctccacacatctgtgtatttcatgaactctgagtctgagcccactagagagaacgcgacatttggaagtcccgctggtaggattttaactgttgtcgtctgctttcagccttggagagccttcctgagtcacccagcagttccaggtcacaaagaagaatcacaccttctcaaacagagagtgggacatccctaggcttcctggagaggacgagggagctcccagaagaagggactgtgcacacgcaagtggctggcacctgggtgtcccgccaagcctcccaccctgctctggaacctggggagccaactgtgctctcccagaagagaaattcatccggccaggaacactccgggccaccattctcctggagtcagagtcaccctcctccctcagaccacccatcgtgtgagtactcctgtccccagctgaaccctccgatctcaaaataacccccaagtggctgtgtatagccaggtggctaagtgctgtgtcaggctagggggcaacaataagcaaataaggatgctttaaaagccaccccttcagtgccaagtgctttgggttggaagtacagtaagtgcagcttatctcagtattgagcttctcacttaaaatatggaggaaaatatcagctggtctggtggctgctgtgtccccgcctcctgtctcccccttttccttttctccctctctctctacacacacacacacacacaacaaagattacgtgtgactgcggtgtgcgctaataagagaggctgtatgccagggggcttgaatgaaaggtgagccagacaccgttgcaccgtctgattagcacttttgagtcttgtttatttttgcaaaagcagtttctttgatggccgagaaaataggtgcgtgcctgttttcccggctttgattcaaaagctcacacagtacaggtgtttgtgtggcttttgttagccctgtggttgtagagaactgtcttgtcccattctgccatgccacttccgacgcaccagccccagctaagctactctaagccactcttgtttcttctgagccactatgtcacttgtcagaccaggtcaccaggacctgcccagagactgtagccgtcttaaggacatttctagaacagtgttcagtagttaagaattggggggggggggggcaaagggagtgctcacatgtgctcacagatcccccagggggcagagccaaaaagatgctgtaagctgcccctcaccatgcagttcaggttgtggttttagccttgggctatgagaggccagacagagtgacaggatttgcccttcaaaatcttttcaagtcggggttttttttgtttgtctgtttgtttgtttgtttgtttttagttttaagaataaatatagctttctatttattctttgagaatttcaatcatgctcggccctctccataatcactgtccaactcctccagattccctccctccctccctccctccctccggatccaatccttgctgcccataaatccatgagtgaggccatccattgaagcatggtcaaccagggaccacatctcctgaaagaaccaagtcttccgaccctagccagcatcaactatcaagagctcctcagcctgaggtgggggcttatattctgctccctcaaccatgacagcacagttttgttttgttttttaagtactttgcaaaactgggagtttgtgtttgtcatcaaagcaaagactgggcccagagatctcctctggaacaccaattaaaggaccagtcttcttgtctaggcttagtgtgcacgtccctgctgatgaggtgtgggtggaactcatgcttcatgtttgtaggagattggttttaagattattcgtaagcagcctggagagatgctcacaggttgagtccttcctgctcttcgagaggactggagtttcgttcccagcacccatatcgggtgacactgaagtcacagtgtctgtaacttgaggtctaaagggccagtgttttcttctagacattcacaggtacattcacacaaacacacacatctgcatgaataaaaataaataaacttttcaaaaaacgattattcctgagtgttggttgaattagacaaaagctatgatactgtgcagccttgggctctgtggcttgatgatttataaccagctttgtgtttcccagaaatctctactgtgattctggtcagggtcaattaatgttaatcatacacattacacctagtactgtggtgtatttgaaacgaatccatgtttctaactttactggactggactctcttcttcagtatgttttaaacaaaaaggcaacagatcttcacattcttcctttaaaaaaaaaaaaaaagacaggatcttactgtatagtcctgactgtccaggaactcactgtgtagactagactggccttgaactcaactgcttatctctcaagtgctgagattagagatgtgagccactcagcctgcctctgaccctcattcattgggtagttgtccttctaaggcagtggttctcaaccttcctactgctgcaaccctttaatacagttcttcatgttgtggtgattcccaaccataaaattatttcattgtacttcataactgtaatctttctactgctatgaattgtaatgtaaatgtctggttttctgatggtcttaggtgtcccctgtaaaaggattgtttgaccaccaaaggggttgagacccacaggttgagaactgctgttctagaaccttccatgtttaatgtttgcagttttgctgactttcattgtccttgagtcttactaagaatttgtcttccttggtgacctgggtattctgctgtaggtgatgtcagactgccctctaaaatgttcactacagaggactttagtcagagagcataccccagagagcgcctgaggccaatgaggaaacaaacctctgtggaaacaagcctctgccctgtgtttaaagttagcctggcaccttctagcctacccagaaagctcgataaacctctcctactgaatggacttcatgagattctactaaccctttctgagtccgtgactgacacgggagctttggggatgtaggcctaaggaggaccagcaggacccgccacagcagacttggagtcaacctgccgtaccagcctgctcagtgaatgaggacaagcaatggggtccttgttcaggggaagagttcgtgatttttctagcagtgtgacctagagaaaagcccaacgcttaaaccagtcaggtctataatgtccctcaggagatgtgcctacggacgataaaccaagggcatggtgggaggttcttttgatctgaaaggtggcagcatttgatgatccatacatactcagtctgtgtcgtctgggcctcctttactgccacctaggagcacggtgtgtggagctgagtgtgtttttgccaacttgacacaaactgggaagaggatccctcaattgagaaaatatctccatctgattgtcctgtggggcaaatctgtgtgtttgtgtgtgggtgtgtttgtgtgtgtggtttttgttctgatttgttttgtttgtgtgggtcctggttctgtaagaaagcaggctgaggggctagagagttatctcagtggttaaaaaacactgactgctcttccagaggttctgggttcaattcccagcagccacatggtggctcacaaccatctgtaaggggatccgatgccctcttcctttgtgtctgaagacggctacaatgtacttatatacgtaaaataaataaattcatctttaaaagaaaaaaggaaaagaaatcaggttgagcaagccagtaagtagcgccccctccatgggtctacttcaatgataagcttttacctagaactttacaataaaataagataaacgttctttatttcccgagttgctcttggtcagtattttattacggcaacagaacacagagcagaacagactgatcagtacagcaccttccacatcctgggtagccaggagttaatctgtttctgaacagaatctatcttacagcacctaagcacgcccaggacgatgagccagggggcgttgctctccaccctctcctgcctcgctgcctctctagactttccgtggtctctttgactgttggtcctggtgtgggggcggggctataaacaaagcaacaagtggccccgccccggtgaggagggcggggaggaagctctgttctgaaggcacaaatgtgtatgttgaattgtgtgagagtgactacaattccgcactaaatttagtgtgagcttcctggaaatgggggcacaaagggaagctgggtggagcgtgggattgttgtcggacagtcagcataccgtttagcccataggcagtgggcgggcagttcttccaagaggaatatttatttatgtaagggattgctgaagatcataatagaaactactttcaattgctggttttgtgagagtcgtgctaatgtcctttgaaggtgacattttgtagactcgctaagagctggggcggaataatgggtcttgacttatgggagtctttcctgtgggcagttgagctgttgcagtccaggtaaatggctttgtggtgatgtcacttttgtgaagggagaggacagaaacgatgtgaaggactttggatgtagtctgccttgttgtaatacccgctgcctctgctttacttctgagaggttctggatagccgtcaaggttgagcagtgtgacagaaagtgacgcgtgctcacaccaggtgagcagtcgttccctctgtggcctgttacaaacactaggaacttagctcaggccttgtcccagtgggagatggcattccaatttttttaaattttattttaaaatgtttattagcggaggggagtgcatttgccacagtgtatgggagccaaagaaaaactgaagaactcagttcttctcctgccacccatggcacacaggaccgaactcctgtcaaggttggtagcaagggcctttactgctgagtcatcttgccagattcattcatccttccttccttccttctttttaattttctatttatttttgcttttgctgaggctcaaagtctgaaggtttctcattttcctaacgccagcctgtgggttcttagttagtgccgcaggtgcccgtgtaggatcctaggcagtgcctgtggacaagctaagcaagcatccttcaacccctttctcaagacagggtttctctgtgtagaccaggctgaccttgaactcacagagatcctcctgcttctgcctcccaagtgctaggactaaaggcgtgtgccaccactgcctggctcaagcattgcctttttttctagaggcactgctttgcagaagtgttcacacacattgtgttgctttaccgtgaggattaaatgagaattgtcaatcgggcaaatagcacaaggcctggggctttgccactgcttacttgaggaccgctgttttgttttgttgggggcagggtcttacgctgtagttgaggtgggcctggaacttgctgtgtagaccaaactgacttccagctcctgatcttcctgcctcaacctcccaaggttacaacatgtgcctcgtgcccaaccagggtggcttgttacagtgatgacgtgggtgaccgtgggctgcacagtcctgaggccaggggaatggagttgctttcctctgtgactctgtatctctgtggccatttctttgctaatactaccaaaatggcaggttggggtttttccaagctgaatccaatatagtcatcacaatgtttttgtttttgtttttttactgttttagtcattatttatttatttattagatattttcaaatctatcccgaaagttctctataccctccctccgccctgctcccctacccacccactccctcttcttggccctggcattcccctgtactggggcatataaagtttgcaataccaaggggcctctcttccgactaggccatcttctgctacatatgcagctagagatatgagctctgggggtactggttagttcatattgtatcacaatgggttttatctttaaggttttatttgtaattgtgtgtatgcgcgtgtgtgtgtgcgcacacgtgtgtgcacgatgtgcaccccccacccccgtttgtgtgcaggttttacacatgaatgaaggtgccctcagaggccagaagagaatgttgggatatctggagccagagccacaggcagttgtgagccgcccagtgtgagtgctgcaaaccaaacgcaggtcctctgaaggagcaacacacactcctaattgtcaagtcctggctacccaccacctctgtgccttgatgggaatactgaacagatgacatagtgcagttgattagaaataaaaatgcctttaaagtaaattagaggccacttatggaacatatccatatctctatcactcctttcttagacaaaagtggcttttttgctgggcgttggtggtgcacgcctttaatcccagcacttgggaggcagaggcaggcggatttctgagttcaaggccagcctggtctacaaagtgagttccaggacagccagcagggctatacagagaaaccctgtctcgaaaaaccaaaaaaaaaagtgacttttttttttagcacatgacaatttttcttttctattgtttatagatttcatacatacatataatgtattttgaccaaattcaattcccccattctccacttctcaaagtgctgctctttatgtttttttttttaacttttattttatgttcactggtgttttgcctgcatggatgtttggatgagggtatcagatattggagttacaggtgttgtgagccggcatgttgacgctagaaattgaacccacgtcctctgggagagcagtcagtgctcttaaccactgagccatttctccagccctgtggtttttatttgttgtttgtgttccagcagggctggatgcctttgcacgcactgtctctgtggatagcctgcacctgcgtctgttctcattcagctccagtaatcagagcagcaggctgtgctcccactgtcagggagttcatggctttgcacaagagcaaaagggaccgtttcttcctatactctatctaattttctttcatttctttttaattaattaattatttatttattttatctgtataagtgcatcattgctgttttcagacacaccagaattgggcatcagaccccattgcagaagatggttgtgagccatgcagttgctgggaattaaactcaggacctctggaagagcagtcagtgctcttaaccactcaaccatctctccagcccccatctaatttttttttaaagatttatttatttatttaatgtaagtacactgtagctgtcttcagacacaccagaagagggcatcagatctcattacagatggttgtgagccagcatgtggttgctgggatttgaactcagggcctctggaagagcagtcagtgcccttaaccactgagccatctctctagctcccatttctctatactttctctctttgactaaaatctgtttgtgcttttggccacaactgcacataagactggtcttcaaagaactgtttataatagcagctcctttccccttgcagagtcgtgattaacagctgaagcctttcatggtaggggtatagaccgttctttattgctgttgcttcgtgtgggaaaggaaagaaagcaccttctctccttgcctgccgtccttttgttccccagctttccggcaccttattcttgcctgtaatgaggacgtcatggggtgctgggtttgaacacagggcctggtgcaatctaagtaagctccctgccactgagttatggcctcagcccttcggtgatagggctttaagatctttaaggtaccttgttgaagtcagctctttgtttgtttgtttgtttttgtttgtttgttttgggttttttttttgtttgtttgttttttccagacagggtttctctgtgtagccctggctgtcctggaactcactctgtagaccaggctgggctcgaactcacagatcctcctgcctctgcctcccaagtgttgggattaaaggcgtgcgccaccaccgcccggctagatcagttctcaagcacccttgggaagtttctgatgctctgagctatgccactgtggtgaggggcagatgtcacattctgacctgtggtagattttatatatgtgtatatttatgcatacgtgtgtgtgtgtgtgtatatgtatatatatatatatatatgatatatgaattcttgtggctcttgacaggtatccagggacatctatccattgcactgatcagaaagaaaagaaagtgttcccggcctagagttttggatttctagagtgctccctggagtactatgctggtgtgcagatgactctttctagcttagtaagacttagtatctaccgtaatggagtttgtctgcttttaggtgaaattaaataaaattcctgaggcaataatacactcccctgttggttagtagttctgttgatgtatgttctttgaatggcctttcaaagcacaagcttcatgctgaccatgatttagggactactccagaccctttgatggttggggggaccactttcataaaccagcactgccctgactgtgttctgcagagccccagtgctgactgaggggctgcacaccatacactggctcaaccctgattcacggtgtggactggattttaatctatgatagcatttgaacaaaaggattacattggtaaaaacaaaccagcagcaacagccttatcatggtggcctaccctgtgggattactaagctatagcatgcagctccctacagaaaacaaattgatttttttccttcgtttgggcttctcctatctaccttttagctcgaatagaaaacttaatttgtgcatggtgaggaatctgactgtagccagccctgtgagactcagaactactgaggagaaagaaaaggagggtcctctagttgtgcctgcatgtatcaacacgatacaaatgactgctctctattatatcaatcatgttaaaatatcaaatcaaatggaatagccattatttgtacctagatagaaccctgattttcttagccgttcaagtagttttgaagcacgtttttcttctgtcttagcttctggaagtattaagaatggtaataatttcaccgctctccaaaacccatcagtcacccagacaaagagcatgcttatcactgacacatacactaatggcgtcccaagaactctgcggtctctgcccgttggtgtggaccctgcagatgagacagagggtttccctgagcactccagacttggtataacttcaatgtcagtccgctcttcaccctctgtgaaggactcaaggacaaacagtggactaactgagcatctgggagatggagaaggcactgagctgtctacagaaaatggatatggacttccatctatacactggcaaagtgatgccccctgtgagtaatctacctttatttgacccatggacatttgatatagttgggtatctctaggggcctctttaaggccatttgcagtttctgaacggatatgtgactatggtgacaccagaccctctgttagcttctttatctttgggtgtggaaaagtgccgtccctaagatgagagcaccaagacttggagggcctaagtaaagcaagcacaacttcttagctcactcagccttgggagctctcacggctggtcatcttccttcattctataatgtcaccttcaaagggagccctagcctgctctttatagctggatccagtgattttgtgtatagaccatctttttaaataacttgtcagacataaacatatattccaaattcatagtttggcttactccttatagtttattttactacatattagaagcaaaagaatgtttaacaatattccagctgggtttctttttagaaaaaaaatgttgttcctatggtatttatgccattgaacttgctagatgtaatgacttcccttgagctacgttctcaagggacagaaacacccaggcctataacttgctgtttgcacatgccgctcacaagtctcctgttcactggcctttagctttaagattacaatgttgctgacatcccatcattttagaaaaaaaaatcggaacgtgatgatgcgtgtagggtgacccatatagacactgttaagcaagcttgcctgagagagcacatcttggttgttaagcgtccttttcagatccattaatggcctttcctcctgtgatatctcacagccttcggaggacgtcagcttgccagcagctcagaagcgggcgatggaagggccatgcctctgactgaggctgtgtttagatcagacccctccattggtggtggagagagcaccggacgatggatcctcaccaagaagaaaacatctacagatgcggcagaaagctcagctttgcatccagaagctgggggtgctgggggcttgactcagtcctcacacgctgcacaacagccccgaggtggcggcgaagactcagggatgggtgggaggagttacgcagagtcttcatcttcttcttcatctacatcttcttccgaaagtctggattcctcagcacctctcagagagcattctcgtgagttcttagtgcatggaaatagacacagggtcttaggatgtgtttggtccttcgatctaccaaagcatactttaggaaaggaatttcactattcccaggccattattctcttagctgattaatacaaaattgctccatgctttaccaaagcatactttaggaaaggaatttcactattcccaggccattattctcttagctgattaatacaaaattgctccatgctttttgtctggtacatttcaactctttttctaggtgagtgtgtgtgtgtgtgtgtgtgtgtgtgtgtgtgtgtgtgtgtgtgcaggttcacaagtgcacagatgcaaatggaggccaatggtcaacctctcccattgttcctcagaagcgatcggctttcttttggagacaagtctctcccttaggcttgggactcactaactcaataaggctatctgcttgtccctggtgtgaagcatataggagcatgctgtcatgctctgcttctgatgtgagcactaaggatccaactcagctccttgtttatgcatagcaagagctttgttgactaagccacctccccagccccacatctaaggagctcctggtaccacctcctcttctctcagatagaactcagggtcttctgtgtccacacccccatagtatagcctgctctaaacccaatacctcctaatgacagaacttgtggatatttcctgtagaagcaatcatatcatacatggccttggttcacatggccttagttcatcaaacatgtatctgtacttctgagtagtaccctgtcagggatgcattattatttacagtgtatctgtgattgttcagggacacattctatgcagatacatgctgtcttgaaattactaagttatatagtagtatcctttctaagtttttatgaaacttgccaatctattttccaaagtgagtgtgtgtttgtgtgtgtatacacacatatagagagtgatacaaatctgcatttctcagttcattatacaagtgacaatgaacatctactcaggtagtaattgctaatgagtgtgacttctttgaagatgcccatttgaatatttttatattttaaagttaagctgccactttttgcattgagtataaggtgttttgttttgttttgttttttaaatatcctggacactagtctcttcagatatttataactcactctactttctcctgttctgtactttgttgattttactttttaaatttttatttatttttattttatgttcatcagtgcttcaccggcatgtatgtctaggtaagtgtgtcaaatcccttggaactcaagttacagacagctgtgtgctgccatgtacccactggctgggaattgaacctgggtcctctggaagagcagccagtgctcttaaccactgagcaatctctgtagcccatcatttttgctttctgatggtattattagagcgtgaaaatgtttaattttggtgaagtctaatgtggacattttagaacatttgttttgttgttgttgttatttgtttgttttgttttgttctgtggggtatttaaatatgcctttgagtaatttttgaaaataactcccagtagttttctcatcataatgtaggtgctggttaaagcgagcatgcttgtcactacatttctaacagatttaaattctgacttccccacctccgaggaggtctctgcttattatgatgcctgtaacacacagaagtatctgactgtgaacgaatcaacctcatggatgagcttggtgtggtactgtgagccttgtaaatctagcattcaggaggcagaagcaggtggagctctgagttcaaggccagcctgctctacatagcagtagcacagccaggacgacagtgagaccctgtctcaaaaaagaaaagaaaagaaaaaaaaaggacagaaaagactaaagagcaaacgtgaagggagaagatgtttatagtcttttgtttccttgcctgggaaatatcattttccactctcaccactatggggcccaggcatgttaccttctcaacctgagaccctaagttcctcccccagccctaccctgagtagtgaggattgaattcgaagcctggtgcacagcaagcagcaagcatgctgaggctccccagtgcccccccgcnnnnnnnnnnnnnnnnnnnnnnnnncccacccccgggcacagtctttgattttgtagttttacattttcaggatgttcctctctgcaggtaatgctcagtttgttcatgtggaaaactgggtttcatttccatcaggactttaggtgattaaaaagcttgctggggctgtagggggtgggggatggcttggccattaaggacacttgctgcttttatagaggacctgaatttggttcctagcacccacatcaggcagctcccaactctggaatatctatgtgatgcccccttctggcctccatgggcaactgcacccatatgcacatgaatacatatgcacatacgtttaaattttaaatccttttataaaaactagataaggagcaacctcattcctggaatgatctcgctatgggttcatgtaatactttctctctttgactctgactcagccaaacttaattttgactcagtcaaaattaataatacattaattataacacctgccttggctagttctcagcctgcccccttgctaggttcaaactcaattgcttctggctatgaagcttctatcagcctctaaccttgatgtgattgtctgcctgcctaaatttcacttgcagagtatacacaacctctcagtcaatatcttttcctctttgcccacaaaattccattgttgtggcccacaaatttaagagttgggcctcttgcacccatactgggtggctcagcacccaggcccttcagcatgccttaggtcacctttgttgatctgggtcactgatgtcctgttcccatgctcatttctggttgaaggttcttttctgtgcctggatagagagagtggagaagcactgattaacactaatggtgattttagggatggtgaatggggctacagagatggcattcagccgttgcatgcataccactcttgcatgggacctgagttctttttccttcactttaaccaaacggttcacagccagctgtaagtccaggggaatctcctgccctctctggccactgtgggtactgcactcttgtttacaaatccacattcagatacacataatttaaaaataaaaataaagggtctggagagatggctcagtggctaagggtacttgtgactctttagaggacctggcttcctttccagcatccatatggtggctcacaactgcctgtaactacagttccagggaatccgatgcccttttctaccctctacaggcattgggcacacacgtggcacatatatatacatgtaggcaaaacactcatacacaccaaaacattaaagacataaaaattaaaataattaaataaagaatatttttaaaaatacttattttatttatgtgtatgtgcacagatcaagtttggacttgatgttcattatttctgaaaaagatttactcggtggtctaataatataagcctgttcaaagtttagcatacaacatacaaaagagagaaagggcatttattcatgtgctgccttccctagtacaacaaaatagaacaagtgcattaaaaataaaaacagggctggcaagatggctcagtggataaaggtgcttgcagccaggcaaaatgatgtgagcttgatcccagaacccaataatggaaggagcgggcaaactctagctaatcatcttccaagtttcccactcctgctgtggcatgtggagagagagagagagagagagagagagagagagagagagagagagagagagagagagagagagagagagagaaagagaaagagagagagagagagaaaataaaaataaaagaatatgaattttaatctctatgcctttttggtttgtttgtttgtttgtttgtttgagacatggtttgtttctctgtgtagccctggttgtcctgtaactcactctgtagaccaggctggcttcgaacttggagatccaccagcctctgcctcctaagtgcaccattactactcattaagtatccatgctattttttgacctatggtgactgacacttcacaacccacgcccttaacttgccaccaacttcactgatacaaccctgattgttatcatttatcaccaagcagaaatccagtattctggatccttgggttggactttcatccttcactgtgaattcaggacaccagaacaaaggtatcaaccctctggccactgataaagagcctctgggctcgaacgtgaggctaaaagtcctgtccctgcttttacctgcgctctcttgcctgcagctccggaagatggtgcaatgctgagtgacagctctgatctggcagacagcacttcgggggctcgcacacctcacacgtctgcaatgtccacccggagcggggagcgcacgctgcggtcccttgacctctcgagtgcagcaacccgccctgcgcgccccactccacgagggaacgtgacagagcacgctggcctgctgtccggggcaccaactctcggaggtgtgtcttcccacagctgccttcctctactgtctgtatactgacccccagtcctggaaggttaggttgactggcaactcaagaagtagcttactgcttactaggaaaagaactttctgggttcccccacccctcttgcctcatgcttgcttgaggtatatgggatgacacctgcctgaggggtttaaaataaagaagagcagtaactgcggtgaaggccatctcctgggaagaaatacctcattatacggagtggaaagttgggaacgggtttctttttccatttgataatggcaattactgtttgggatctggaagcttttcaatggcgatttgtttttattagaagggggcaagaggaagggctttggaaacatttcctacttttaggcttctagtccccacttatccactattctcacttctgtcaggatcactgcttctcgcaggggggagggaggatctactcttagtgaccctgaatatattagctttcctttgtcatcttcactcagcgtgctggccacgagaaatcgcctctcacagagagcatcttcctctcttaagttcacggctaagacacaaaagagtattgcccagtgcttgtttcgaagattccttgtttccttgacccaactttgtcttttccgtttgtagtcaccggacttagctacactcgagaacatggctcagacgctgggcagaggacttccagtgaccacacagaccacggctatgttccgtctactttcaccaaaggagaacggacgctactgtctattacagataacacctcctactcagaggccagcgagagctcaacctcttccgttaagatctcagactctccttctcaggctcagcctaaacagagtagcatgtcctccgacgatgacgagcctgctcagtcttccacagagtcaccggttctgcatacgtccaacctgccaacctacacgtccactgttaatatgccaaacaccttggttcttgataccggtaccaaacctgttgaggacccatctgattcacgggtgccttccactcaaccctcaccgtcacaaccccagccattctcatcagccttaccatcaaccaggtctcctgggtctacctctgagacaaccacatcctcaccatcaccttcacccatctccttactggtgtcaactcttgccccatattctgtctcacaaacaaccttcccacatccatcttctaccctagtccctcacaggccaagggagccacgtgtgacttcagtccaaatgtcgacggcaatatcagccattgcattgatccccagcaatcaaacagcaaaccccaagaaccagagtaccccacaacaagagaaacccatcacagaagctaagtcaccaagcttggtgtctccgcccacagactctaccaaagcagtaacagtgagccttcctccaggggccccttggtccccagccttaacagggttctccacggggccagcccttccagccacaagcaccagtttagcccagatgtctccagctttgacatctgccatgccccagacgactcactctcctgtgaccagtcccagtactctgtcacatgtagaagctttgacttcaggtgctgtagttgtgcacactaccccgaagaaaccacatctcccaaccaatcctgaaatcctagtgccacacatctcaactgagggggccatcaccacagaagggaaccgggagcatacggatcctaccactcagccaatccctctgaccacttcaaccacgtcagcaggagaaaggaccacagagctgggccgtgcggaagagtccagtccatcccattttcttacaccatcttcacctcaaaccacagatgtttctacagctgaaatgttgacttccagatatatcacctttgctgctcagagcacctcacagtcaccaacagccttgccacctctaaccccaggtaaagggcatcttacaaatacattgaccattaggccctgtccaacattagagctacaaggggcttgtgggttgtgtgagtgtgtaggtatgtaggtgtggctagtatctgggtctgttttatgacccagaatgactcccactgaagtacaaagcatgaaatatgggcagtatgggcctaattgtctcttgatatcccccaagttatgtggttctctctgaagaacgaggagagagaacacattggccctgtgtgatgtgtatagaagatacaactgtagcctgtcattccaagcattttaagtgtacctttaactcatctaaggtcagtgccaggtggagatgtgggtttggacagtggagaagctgaaggagtaactttcacggggctaaggtgcagagtgtcggcagaacacttgcctagcacacacacacacacacacacacacacacacacacacacacacacacagccttccacaggctctcaggcaccacagaagaaaaaagaagctctaggtagtttgttagaggtagaggtcagttgaatgcctgctttccagagagaacccagagcttcccagtcagtcagctcaaggaagcactcagggcttcccccccacccccacccccaaagacttctttccatcaaagaggccccgagttctttgtctccctaattctattgctagtttgtaaccagaaggcatgcaaacaaaaggatgttcaacagacctcttcccagcgctcctttacctcgtgggttatctatacagtgtgttgaaggtactggtgtcaggggcaaaaggcaaacgaggggggggggcagaagcaggacatggggttcccaaggcacttgttcccaagactccggaaaagagaagcgctgttgaaggagagacagatcgcaccttaagttacaggaaagggagggaaatggtgtgtgtcggctgcagcagagagctcagtatgtggaacgaatttcagtttgtgaggatgaatctggagtgcacggtcataagctgtccccactgctaggccacagcgcccccttctcagcgacctgagtatgtctaagaagtaaaagataattgcttctccagaaaaagaaatcttcatttccaccagccgatacgtacagtcccaggttcggcaggctcccttaaagcgagagttagctgttacagttgctggaggtgtttacagcatgttcactgcaaacgatagaattacctaagggcacggcgtttaatcctgtaggtgctctgtgcatatcggtgatgctaggtaacatttaaagtatgggggctggagagacgactgtgtctgtttaaaggacatgctgttcttttttttttttttttttttttttttatggtttttcgagacagggtttctctgtatagccctggctgtcctggaactcactctgtagaccaggttggcctcaaactcagaaatccgcctgcctctgcctcccgagtgctgggattaaaggcctgtgccaccacgcccggtggacatgctgttcttgaagtgattctgagtttggttcccagcacccatgtggagaaagtcacaaccagttgtaattccagctccagggatgcagtgcctactcctggcctccataaacagtgtgcccacatctctacccacaccccccacttgtctacccatgccccccacgtacacataatttcaaaatgacaaatctcaacaatagctgtgaagaataagattgtcatgtctagagcagccctcttgtttcgggttattttgaacgacgtgacttctgttgcctttcccttctcccccaggtatttcctccctgcaagttgatagtgtggttttcagcttctcaaaaccctttatgaacaagtatgtcataactggagtgtgacccttctaactatttagagtaaaacagaatgtgggcgtcattggggcagagaatgaatgggagactccagggtgacagtaaaaaggccctcatggattcagatggaaagagcggggcatgggacacctgtaatcctagcacttgggaggtggagacggaagactcagaagttcactgccatccaggttgcctaggagaccaagaccgcagtgaactacttgagaagggcatccccgtgtttaaaagatagttttctaggcggtgggcaatctgtggaggcctgattaaatttcaggacactcagacgctgagcagggtggtacacatgcaggatcccagcacttgggaagtagagttaagtggatcaggggttcaaggccatcctgagctatgtagttaatttgaggccagcctgggctacatgggaccatctcaagataaatcaaaacaacaaaaagtgtaacaactacgaataaatgtacatgtttcgagaattttcagagagaggtttctagagttttgacaaagtccaagagaagaaaaggagccgtgcatatgtgtgcattcctgcacagagtgaatcttggagcagacaggataaattgattggggattctttccaccttagaacatgttttaggttggcatttacttgagtccaggagaattttctaagtatcactaaggcaatataattactggtcctgaaccaagcagcccgcaagaagcatttagtattcatgcttacattcaggtatgcagttatctagcacttggctatgaacacaaactacatctgtgcccggtaccatcacctctgtcttcgcacctctggggaccctgctctatcttagtgggtgcgagttttttcagggcaagtaagcaaacataagctagacccaagcgttaaccttgggaatgagatgttttccagagctgctttgacatcgcctgtgttattccttccatgtgtttagtcaacagctgtaccgtgaacccttgtcttcatgatggcaaatgcattgtggacctcactggccgtgggtatcgatgtgtgtgcccgcctgcctggcagggggagaactgcagtgtgggtaagaggcaggatcatttactggaatgttacttgggctattgggctattcagtaagaccctatttccagggttgacagcatatactgtgcttgcagaggacctaagtttgagtactataacccacattggggcacttcattactgcttataattgtagctccaacacaattggacacctctggcctctgcaggcacctgcacgcatgtgtgcatatatatacacatacttaaaaacaatcattttaaaagagtttttctgtttgttctagagtgtacaaaggtaagatttttagtttaatcatcttcttgcttaagtgttaggatgcttgtgtgttgtctatatgataatatgaaggaccacagcatgatacacacaagcttttggcctggttctgctctatagattctctacacccctgcaacactgggtcatctagagctccctaaagatacctacactctcctgccctgggcatttaccctgctagtccctcagctcagaatcagaccctcttcccaaagatctactggtcgacatctctttagtcttatttatgatttaaatataatttcaacgtctttaattcttccctgcatcaaaatctactgtttctactgggcatgtccttaatcccagcacccaaaagtcagagatagtaggatctctatgagttcaaagccactctgatctacatagtaagttccaggccagccaggaataaaaggatgagaccctgtctcaaagcaacactaacaataacaaccaaccagatctgtgtttatctctgtacatgccaatcccaccctgtgatatagttaattcttcatatggttgccactgccctggcaggcagccatccccgtgagaacaagggtggcttcccgctcttctttggaagcacacgacacacgacgcacggtgccagttggttttagtaggcaccgaatgatgatccattgcctgccaccccatcagcatgctcttgtttgtcccctcctgcagatgtgaacgaatgtctctccagcccctgtcctcccctagccgcgtgcaacaatactcagggatcgttcacctgcagatgcccagtcgggtatcagttggagaaaggaatatgcaatctgggtaagagttaagtctgccttgcaactgactgcttccttcctaatcaaagccaacatttttttttccaagcttaaaaaaacccagggatatagaaatgaagctcattgcctgttactccaacgcctgcagatgcggtacttttcttcacctttgatgatgtacattatatttttatatattaaattcaagagatatctgtaagtatatccctgtgtcacaaaaaaaggacaaatatcttaatgcctgtgtaatgtgctcatttgtgcacaacagtatttgttcaaccattttacccttcagttaaaaaaaaatcaaatggatattccaactacataggggttttaaacattatttatttacttacaatttcagagtgtttatctgtttatttatatttatattttagagtaaaaaaaaaagagtaaaattctgattgtccacacattctccttgagttgttagccacagacaggtgcattgtgacgcagccacctctaaaatcaggccactatattggtcatgtttgttcctcatttgacaggtccaccaagctgcttggttttccattcgcttttcatccgacaggttaaaaagtagatcagcaaatgcagcgaagacagaggctctgagatgctcagaggccaagcatgggccacagctggtgagaggcctggtttccagcccacagttttctgttgtaccacagtgtggttattattagaaaagcgttcttgcacacagggcgtgacccttgttgggttgctgagtttaacaccatgcttgcttgagaagttagaatgagaaattcagttttgaagctgaaactatcagataagataatcggcctttggaacagctacagttgcccagtgtgaggcctcctgcagaagtgctcagccagtgtttgggggagaacctctgtgttggctgcaagtgttatctgcatgaacctctgacacccacagacagaaggagcttcttaaggctgacactctactaaaataagaataatgaaatttgtctgaaatacaaaaaaaaagagcattattttctaaaaaggggaagtctacatatgtagacatgagtcaaaattaagaatccctcttaattctaattagtctgggtaacctggtctgtgtaaccacctcctacagggaactagctgaacgtgtgcagttgaagaatgaaggagatggaatattggttattgttgttggtgttttgaaacccatggtttcaaatgcctggctttaggctcccagccaccacctgcactgactagccagagcctcagtgtccccatctgttaagtcagattgcacattgctcactgctcactcaaggtttggggaatgtcgaataaaataatctgcttgagcaagtgccgccgagtgtgaagagctgtccagatggaaggcagcgttcgccagactggatgctaggaaaacaagcagttgtcacaggtcaatagtgaaatcggcagttaaatctgagattaaaaaaaaaaaaatcatatcttataagtaaggtgggtcagcagataaaggtgcccgctgcagagtctgaccagctgagttcaattcccaggacccacgaggtagaaagaggaaaccagttcccacaagctgttctctgaatttcacatgagtgctttggaccgtgaacacacacgcaaatgcacgcaggcaggcacaaagtaaatcagtgtgattttttttttttttacaatacccgttttaaagctgggcggggtaactgcagacgtggaagttgtcttgaatacactaactatattaaaaacagggacacatctgtgtctttccacaatgtcagaatttattgagtcacaataagctcacaagctacttcaatttcatttgctctgatttgccaaattattctcatctcccttgacagttggccagtggcaagcattggcttattccaaatttaattactaatattaactcagatcacaagttacacatcagggtaaaggggtatgtgtgtgtgtgtcacagaatagctacaaaggggttaaagaggccacagaaaagttcaaggagtttaaagaggccttaggagtgtcagagagctaataccgacgagaagagaaccagtccctttagcggttagaccaggaaccacaatggacagttactgaggaacgcatcaagctgctgcggggttaaggctgggactgtccatgtgaaaggagcttagaggcaggcacaggactgtgaggtgaagcccagacccatgtaggccactgtggagaaatccgacacagaaccagggccagatggacaaagagacagagaacgccacggcaagagtggacactgagccaagctgaagccctatggtcatgcagtccccatgcattctgggtggtcagatgccaggttgctggggccattgccacaagagtgtcaggtgtcctcctctttatggggtgcaggcgtggctgttgcacccttccttggtgtgtttcataagctcttgaggtctccctttccactaagggttttggccctgtactcatacagatccaatctaattgatagttttgcaacaagaaatgtagtagcctgtgccccatgctggacaggaggtagtgtttttatccacagcatgaaatagagtcaaatgcttcttgtataatggagtcacccaagacaaagcagaggctgaaagtccctgtttttacaatcagcaggaacttaagccaagcacagcctcctctccacagaggtataaatgccttgggcaaatcccttccaggaaaaaagacagggtttaggaaaggacggatgatattactcatgctaaagacagaaggcacgggcaggcagagaacgtctgtgtgccttacccttatcctgggcacttttccaaagggaagagtctggatttgaacctgggcccgtgaggagtgaagccgagcaggtcaggtgactgtgtgcagagtgcccgcccacaagtagcacagatgggggggaaagcggttcagttttgctaaagactagtctttctcttttcaagtcattaggcttcattgttcgtaaacatcagaggggcatgcaaattagagcgtgctgaaaggctttgccttggcccagagtgttttcaaagagctgcctgctgctcctagagagtcctaagcagctggcttcgctgaactgtggaacaagcagaaggatgttaaataagaactacgggctttagtcagttaactctgaaatgttagctgctttccctggctcccttgcctgccttcctctgaattcagcatgcagcccctgtgtctcgggttatttttcttctgtattgaggggaagatatgcgtttaatataataagatataatttaatacgataaataataatcgataaatataatttaatataatgagtgataagagccagctctaaagacggactgttaatttttggttgtctgctcattctggaacctcaggcctaatcatcagaaattggtgttacctagaattttattttatgagtgaaacaggcctcacaatgagggagctttcctcctttctgaatccagccctgtttctaacatggcttgttttctttacatgcctgataataatgggatcttagcaccttggagtctaaacctaccacaaacatgtgtcactccttggtcacctagatgaggaaggagtgtatttaccctcaagacacacccagactgtcccttgggggagtaaagctggccgtcccagggattacagctgcatagccttgcgttggtctctgctgtgtggcttaatgggcaatgttttcctctgcagttagaacctttgtgaccgagtttaagttaaagaagacttttctcaatactactgcagaaaaccattccaacactcaagagcttgaaaacgagatcgctcaaacagtaagtttcccctacaacgctctgcacgctaagccttagttttctagaccagatctcattcagaagtgcatacttcttagggtcgtctgtatccgccggacttacttcagtgttcacagggaaagttcacgctgaagttaaaataaaagaaaaagaaaagtcttggaaatcaaagaaaggtgttaggctctgaagagtgctcttcatatgcaggccccagctgccaggctgccaggctgttccgttttcttgggcaaacacagagtcaacaggcacgatgatgcctgcacccatgtcagctgtggatgaagggaaaagcttagcgtcccatctgctgttgatacctgatgtgacctcctgtgttctcagagcttggagaaaggccactccttcctcaaaggatgccagcagcctgatcctaattccgattagacttggaactgggcttgtgagctcacagtgtaaattatctagaggccttggatgctgttctttccctctttgcttttatggtaggaaggaagaatggagaaatggaaacgaaatgcagacaatactttttttttttttttttgttctccactgctgcccaagtcaaagatttggtgtttgggaaccgaaacttgccattacactaaattagagatgaaatgaaattagatttgccattacattgaattagagttcattcattagccaggaattaagtgttcttataggactgtagattttatttgtactttaattccatttccatgtctcatttgtgacgaggactatgccagatgctcagtcctgtgagagggatggtaacacatttgcggatgggaagctgggaggctctggaagctgacgggcttgtctgagtccacacgaagcagaagcagtgttgacagcggtctacttggttacctatgttacactagctgcaagtctggaggtttctaggagcactctacatttcagtaatacactaggaggacccacagaactgattgcaggccatgatcgtcacagatcagttccgttgcactgacaggttttaagttcaaattagccaaaggaagaggtgcacgagccagagtgtctgggggtcccaaatgcagagcttctagttgctgtgtcagtatggtattgctgacattgttgtacctctcggcagcagtgtggactaactatatggagttctgccagccataatgcttacctgagccttgaggtctgaagcatttatttgaacgtcgccttatagacaaggttgactgcccaggtggctgacttcaggccctacgccctctagaggctaagatgatgtcatattacccagagttccctctattgtgtgtgatcacatggctagtgacaggggctatgccagatattctggcatgacccaggactctcggctcaaccaagtttttcttgtcagtcaggacactctgaataagagctcagaaactgccttgtaggggcagaggcatggcgtctctagccaaaggagattcattgttcctcctgcttattctgtagggagatactttctgcctcctggttattctgaagggagatattttcttgtaacatactgtagggcgttagagccctgtgcaatagtgtagtccttctaagcaatttgcctagcttggttggtttgtttctttttttggacaagtatctccataggatacactgggccatgacacacctgaccccaactagcagtgaagaattaaatgaccatcagagaaagcattagcatgggctttcttaagatggcattctgctcatacctaggtaaaaggttaatatggcagtaataataaatcattgctatattaatgtggcattcaaacccacaaaccgtttggcaccattccacagctgactccatcttcccaagtcagagggctctgaaggcaggtggatctacctgggatgagatgctgaggtcctctgctccattaaagggaatctcgagcttcgctgtcagggaggcggacacaacatgttgtgttgctcagaggctttctgctttccgtgggcacaaggcaaacaggaggcacagagctctaatgtgttcccaacaaaagacctcttgacccccccaccccacccccatcatgtaatttcccacagagtctttttgaggaaggacctttgcggcaggtcaactcatcattgtagattctgaggagcctgtagtcagacctggggagctaagaggagctgagctttgtcagctaacttgttcactatgcagagtccaaataaacagctgcctgggtttttgtttttgaaaccctgggtcttagaagggatcttctcctttgaagatgttttgttttcgaggatgctgctctgaacatttcctgctgagatttccctactaatccactatctgccctggggaacaacagaaagatatttaggaggggggcggggatacaaaggccgcactgctttgagtcaaactgcctgctgataccttggtggcgatagaaactacctattttatcctgaaaataggaaattgtttcttggctcaaggattttgtctgacaaccgggttcttcatttcagctaaacgtgtgtttttcaacattgcccggttatatccgaactacagcccatgtgtctaggtgagaaacagaatttcttttgcttatgatctgatctgtggaattgggggggggtgtgtgtgtgtgtgtgtgaagtggtactgttcccaaatgagtgatcaaaataaagccagtctctgttttacagccaatacaccgggtaacccaagaccacggtctctgggcctttatactctcctattttttctgtggagaatggcagtaacatgtactttgcaagctacctggaacccacatgtcatttcaagtcagttaaggccttgctaactttgcccacagggagcccagtacagttttcatctcactgaaaaccacctttgccctggcctccaatgtgacactgtttgacctggcagacaggatccagaaatatgtcaactcctgcaggtcctctgctgaagtctgccagctcttggggtctcagaggcgggtctttcgaggtaagatgggagtcctctagggggggaaacctgctcttgcaggtaggcatagacttagagatgggaggtttggggactcaggcccagaaaagctccttcacagagcttgtctttagaagttataagcacaagccttcatgacactcagtgcacacatctgtctacacatggccttttacagcatcagctccttggtatctggctccttcttttcttctatacagtgccagggtgagaggaagatattacaggagctgaaggaaccaaaagctgttactcccgcttcctggggagacagaaagtgacatatagagtctgtcaagttgccaatgatccaacaatctttatatggtgatgactaagaaaaaacaaagagctatgctcatgcagtattacctatcttttgtttgttttctatcataaaaccatagaatgactaagagggagcatggcaggatgctcccaggagtgccgtaatgacaggactctcccttcctttgttcttgtttggtcggaggctcttgccctgtgttggggtaaggccaatgagaaaggtgactcaggacaagtctggaagacagacttgcgtctttcagggatagttttatagctgggagaagaacactttgctggaatgagaaccgcccctagacacagtgggctagtccctcttggtgatcaaagtgtactctggttagctcattggaccagtggttgaggtctggcaaaggaaggagagcttaggctaagtctcccccatctggcatccagatgttagacataaattgaaggtatcaggttttggtgccatatccgctggttagtctaggccattcccagtgggtcaggatgttgtaactgctggtccagagctttcctcgagtgaacagttgcactgcagagcttgggagctgatgctttcaccctgagataggctctggggggctggctacttagtaactggggggaaatgagctgaacataacagagttggagtgtttttgttcaaagttcatgccctgttctagggtgctggatactttgaggctctctggttgtatggttttgtttctcatgcccagggctccagggtactatttttcctcccagtgaggtaggcacccttcagtttgctaaccatttctagactgcatttggcgtggtcagcattggaccaaggtacttttctgttgccagcttgtgcatctgtgctttgcagatcaagttggcaagattgtgtggatgcgcaagagcctgccctagcaggagtgctcgctcacccagctgctttgcttggactgcccccatgtggcctatagaaagactcttgtccccatgaggaggccatcctcactgtgttcccttccagtcccttgagcataaagacagccatgcctagtagccaaaattggactcacatctgtttttcctccagatcttctctaggttttgccaaaggatccagctctggctcttggtaatttttctggagctagagaggaggctagaccagcaggtgctgcacacctttgggtttctagcatccgggcagcactaggatgctctggacattgccgctggcgagaagggctttgtcccctcagttcagagaatgtccatctccctcctttcaaagccctttagtcctcatggtctcctgggatttagagactttggaaatcccccctcatggcctcagccttggcttactgagtactcattgtctatcttgacggatgttatgcccaggaaagaccatgggaacggtgaatgcagaagactcacatcaccaaggatcgatttaagtgagattctgcatggtccttttgggtggctttatgagacacgttcattgagaaagccactcctcattggaggggcggggcctgccctccctgttcaagcagaaatctggcagcaggcaggaactggttgcttttggcaatgaatattcgttagcagcctagatcagtgggcaggatggaaggagaacttaacattgacttccagaaaatacccaatcagagtgggatttcccagcctaggatggcctggatactccttatacttggaggtgtttttctctgctaagtctcattgactggcaaagccttcagagaagtcagatgtgaggtgccggaagctgagttcctccctggtgccagctttgcaaagtttgcctggtgagatttttccgtttaaacatttccccttaaatacaaacttttttttaaaaacaataaacaaaggagcccagatttaacatgtcagcttccactgataaaggcaggaaattcaattcagcactgggaaatgaagctgtgccctaattcacccggctagacagtcagtctcagttctcgggaccctcaagagggatggatgctgggaattccacacggggcccatcaagccctggtgtcagctcccatcaccagaatttgcccaggcaagggttaattttgcagaattaacaggcaccttctgaagagcctggggccttttctttgacaatgcctacaaaattagcacccaattttcattgtacaatgctcagactcttcccatccccctgccactctcctcctgggttcaacttgcttttgaccccccaacagcagaagcacacatctgccatgtgaggataagttattagccgctgtcatgttggtttcatagttctgttctccctgtgcgcccactgacgtgtatcttgggtggtaaaatgtactcttcattatcttggccgtattaaaacctcccagaggactatgtgcccagcagtgaatgctttttgatacgaataagctgattctttatcaaccatgagatgaataaagcccccaaatgaacacaaaaccagccttaaaactgggttctttcctcgtctgcctgtttctcctggtgatggtgtagcgactgatcaggccagtagggacttccccacnnnnnnnnnnnnnnnnnnnnnnnnnnnnnnnnnnnnnnnnnnnnnnnnnnnnnnnnnnnnnnnnnnnnnnnnnnnnnnnnnnnnnnnnnnnnnnnnnnnnnnnnnnnnnnnnnnnnnnnnnnnnnnnnnnnnnnnnnnnnnnnnnnnnnnnnnnnnnnnnnnnnnnnnnnnnnnnnnnnacagacagacagacagacagacagcttcctgccaaccctggggaatcagattaccatacaaacctcgttctataataagcctccaaaaggcaacacactgagagcaaagcaagctgccttaccacagagtggtcctgggcccctaggacacagagcccggacatgtttccacttgagactggtctgactgtattggttggtttgggtccaagctcctgacttcctaagaacatggtcacattttctgggtttgttccagccccaccccccacctcccttactcccagtccttaaacgtgaaggtacagaatacaccaggctgcatttgtaggttgggcagcgccctttccttcctcagtttggtttctccatagggaatgcttgtgaatatttatttactggcggtgaccagggaacaagaggtagagactgtgtagggcctcagaggactatggttccaagaagactctgggaaactctcccctgagcctattgaaatagcaagttcatgcgtcataaggtgtgaagaagaggtttggtttggtctcactgccttgtttttcacatcccagcgggcagcttgtgtaagcggaagagtccagaatgtgacaaagagacctccatctgcaccgacctggatggtgtcgcgctctgtcagtgcaagtctggctacttccagttcaacaagatggatcactcttgccgaggtaacttcgggtccccagcagttgcgtggcacatgctctgcagctggtctctgctctaggcaggagcagtgcattccctgcaggtggtctctgctcaaagtgtgatgcttctaaactgggggttactggctctatttgaccagcagcaggaatgaatacagtgtttccttgcaagtatctcctggtttgtggtggtctagccaataccatttaaaaggaaaggaaaatggaagctatcacaaggtccccttttccctccttgctgttagaggaagttagaaaaattaattctctccccaaagtgttgtctgttaactgcttatcactaaaggtagaaatacaagtactgatctgggcctgggtctgtctgggggcactgtggcttagtagtgagtatactcaatgatgcccaggacacccggctcagagccacattccgcctcactaaactggtatcatcttgagcaagcacttcatttctctaaacctcagattcctcttctttgaaatgagtgtggtcactttgttagatgtcccgagaagtacagctgtgactcaagttgggctttgtaacccacagggacttgcttttgtgtttatctaggttgttgataattcaatgggttatcattttaaaggttgcttggtatattggagagtaaaaatctaattctgccagcctttgggaagaagccaaaatgcactccatttgagacagagaccaccacactcagtgaatgtggtccaaaagtttcccccaaattagttttattcagcttcagagtgctgtgtcccctggcttcaaggactgccacagcctgtgacggtcaggaagggtgttaatacagaggctcctttttcacacacagcatggtctccagttgtaatgtgaaaggcacagacttcctggtcagtcaacaccttgctggcgacagatgtgctgagatccaggtgaaaaatccacacaagggcaaggtgacaggccactattcagtcaggacctatgctgtgaggactcatttcatcaaaaggatataaaaatatgtctgggggcagcactttcatcctgcaccatacatagatctgctgacagtgttacgtttagacagaaacttcttcagaggtgggcggtgtcagctctccacgtgggacctacagtaggtttggaagagcacctgctttcggaattgggcttctggcctggcatgattggtccccgacatcccattgccatgccagaccgtcgctttgccacaaaagaaataaacgtccctagctccttcttacctgctttcctgcccttcttaaaaatgagggctggagctcagctgcatgtgggaaaatgacaccactgaggccgtgtgtgtggtgctatggtgctgtgtgccatggtgcctgtgacacaggtgagcaggactgtgggcgggcagaggagctggcctcagaattagtccttcaaggatggccttgccttcacccttgctcctgactggtttggaccacttctttctacttccaagtcagcaatgtcctaaccgtatcttacagacaagcgtagctagaggttaccttggctaagcctctctccaaaacagtgtttctcaaccttcctgatgctgtgaccctttaacacagttccttatgctatggtgacccccaaccataaaattatttttgttgctacttcataactgtaattttgcactgttacgaatcgtaatgtaaatgtctgttttctgatggtcctgggtgatccatatgaagggttacgtgagacaggttttgagtaccactgctctttatggacagctcctttgattttgtatgtaactttgaaagtatgacaaaaacaatatagaactgtcttgtaggagacagtaagaggcatctgtgtatatatgggtaaataccatataaaaccttggcaatctataacttgaattgcagaaatttagaagaaaaaaaatacacatttcgaccctctgtttacacagagatttggctgaatttgagatgacttgtcgggagaggtgagaaatggtctccccttctaacccaagcccttctagaattcagtagatagcccagctagcctcaagctcacgatcttcctgtctcaggtgtcaccacactcctgtctaggttgtcattttcaggatgtgtgctttaagtgacacaggtatccccagccttatgcttacaggtaatgaccaagcagcagcacggggagaccctgattagccttggggcccgtgaggtgcttcctcagtggggcagggccagcagtcttctgatgattggatctagtaggtttgtggactccagccctgtccgatgggttagcagtgacatcttctggccattcgtgctggagtgcacttactgaaaattaaaatatgtgtccttcctgtattccttagcttcctcccaccacacaagcatcgattctagcaaccttgttgtaccctctgaccaggctgagattagcatttttaaaggtctttttttgtgggggtgggggtaagggttgatttgttttttaaaatagggtctcactatgtagtcctggttagccttgaacagagatcctcctgcctctgtcctcttagctctggaattaaaggcatgcaccgtcacataaaattttaattttaattgtgtttgtgggccttaagtgttacatgtgtgtacaagtaccctagaagtccagaagagggcactgtatcctctaaagtgggagttacaggtgattggggggggtggggggcggaaactcctgtctcctggcatagcagtgagtgctctcaatcactgaacattctctgcagccaggattctagcagtcttaattttttcagatggcaagtgccttaagacccaacattgaatgtaggaaaggtcaagtgtctaatgaagtgggccataggacaacagatacagcttaagaccatccgtgtcctgcaaaggcgttactaagtgttacttaatatccggcaaaggagttgctaagtgttacttagtatcctgcaaaggccttactaagactccgctgtgtactttaagcttggttttgctttttccctaggcagtaggcaaagctcagtgctgtatatatgcaaattcttgccacaatcgttctgtctctagtgctccgggtcagagtccctctgtgatgaggaactgaaagtgcctttgcggacaagattttcccaagagcagcagtcactcaatcattgataagtgatggatacgccctttaaaaaatacagtttagggagaaaaaaaaaaaagtcaagccaggcagtggtagcatatacttttaatcccagtactcaagaggcaaaggcagttggatctctgtgagtttgagaccagtctggtctacagagagagttctaggatagccaggctacacagagaaaccctgtcttaaaaagccacacacacacaaaaaaaaaatctttttatatatatttatttgtttggtcgtttgtgtgagtgcacatgtgtgactgaaggataatccaatagcgttgcttctttttctaccatatgtaggtcctgaggattgaactcaggtcatcaggcatggaggtaaatgcctttacccactgagccacctcactagcttgtgttctttcagttagaaaaatatcattgggggcggagggggggtggtcaagattcttttgatgttaaatgaaaatagcccaagccgtcagctcgagcgcataggctggacaacagatgggccttgtgcatagttgggtgacagccaggcgtggaaagctccccgctcagcacgtgaggttggggaggtagacaaatgtaaaaatgtcttcaggaacaagtgtttagaatagaatggactgatgagatcagcctaccttgatgatgagatgggtggagaggtgaacagtcccagtggagcactcctgtagtgagcagtccctgtggagcacttccctggagcactcctgtagtctgagcctgaagtcatccctcatcggcttcccactggagcatgcctcagaggcccatagtaggagggggacctgagcgagggcatgaagctttctactcaggccaggaaaaaccggggagcactctgcttgttccatagaggaggacctgccttcctgaggcagagaactcagggtgtcaaagattaggggataaatcccagcaaccacatggtggctaacaaccacctgtaatgagatctgatgccctcttctgggatgcctgaagacaactacaatgtacttacatataataaacaaataaatatttaaaaaaaaaaaagattaggggattcagcctcatcttatctcaaaataggacttgacactctatcttgctgaataaaggatttgaaacacctattgaaattcttatcatgagttgggcagtggtggtgcacacctttaccccagaactcaggaggcagagtcaggcagatctctgtgagttcaaggccagcctggtttacagagtgaattctaggacagccagggctacacagaataactctatctaaaaaaaatttttttaataaaataacaaacaaacaaaaacagagacatagagggagaaggaaggaaggaaggaaggaaggaaggaagaaagaaagaaagaaagaaagaaagaaagaaagaaagaaagaaagaaatttcaagtaaagaaacaaggtttttacatattaggggatcagcaggatggcttggtggatagggatgtgggcctgatgaactcagctcaattcccatatcccataagaaagaattgacttctgaggcttaacctctgacctccacatgctctgtaacatacacacagctgtacacacacacacatacacacacacaaaataaaaaataaaataaacaaaaatgaacctgaaacggtactgactgggcagggagaatgacatgaaaaagtcatttacaaaagaagcacaaatggcagtaacttattaagaggtgttcagcatccctagtcatcagggaaatgcaaattaaaaccactttgagatagcacctcaccccagtcaaatggctgtcatcaacaaatctgacagcaaatgtcagaggatgtgggaaaggaagccctgtgggggtgctgctgggggtgggggtgggagggctcacaccagtacattagtatggaaatcagttcagacgttccttaaaagattaaaaataggactacaggagtcagctatttcactcctggtatctatgcagagaagcccgtgtcctaccgcacagatgttcacacgcccatatttattgttgctccatttatgataacaaggaaacgaaactaacctaggtgtccatcaacaggtaaatggataatgaaaaatgtggtgcatacacaaaatgaaatggaacattactcaactgtagagaaaatgacgttacaatatttgcaggaaatagatggcattagaaggtataatgttacgcaaggtcacccaaattaagaaagaaacacaaccaaaccaaaccacatgttctctgcccttatatgcagaccctggcctgtaatgtataccatgcaaacagtgtcagtgtgggtgcagtatcacatttagaaaggagaccaagtaaggatgaggagggtcagaataaaggcaaaagggcacggaccatgaaagagatcataaagctaattatttttctagtttcagctgtgttgaacttctcctttttgtggtggataagtgcatgaaagatgtaactgatagttaaagtataaaaccctaagtgaggctctacggcttcagcctagaaggtctaactgtattgaagtttacagaaatgtataggatttggatcagatcaagtgtgtatttcagcaggtagctgagccagtgatggttttgtttctaatttcattacaataaagtgattttctttttgagatagggtctttcttactgggtagctctggctggcctggaaatcaaaatacagactaggctgtcctcaaactcacaaagacctgtctgcctctgcctatagacaactgggattaaaagcatgtaccaccacactctgatacattattatttaaaaaaagaaaaagcaatcaaagatttggctgtttaggtatggcacaggaaaaaagggggtggggaacagacatagtctcatgtacctgtgacatcagccttgggacgctgaagcaggagaattatgagttccaagacagcaaacgttcctatttaagaggtaagtcggattaagagaacactggctactttgttgagactggagggacagggaacatgcagaaagctaaatagtgtatttgcccaggaaggccatgcatttccatgcaaggtctaagatcagagactaaccagaaagatcatgatcagatcccacgaagtccagaaagcacactagtgtgggccaggagatcccggtctttttaggcattgaggcccacaagaagtttctctgggcacgctcaccaagaagttactatgatactgtagcaatgtggtccatggcatcctgcaatggggatttcttgtggctgctgctgagattaaacagtctgtagcctgatctacagagagttccaggacagccggggctacactgagcaaaaccctgtcttgaaaaaccaaactgggctggtgagatggctcactggtaaagagcactgactgctctgccagaggtcctgagttcaaatcccagcaaccacatgatggttcacaactatccctaatgagatctgacacccacttctggtgtgtctaaagacagctacagtgtacttacatataatgaataaataaatctgtgggccggagtgagcagaggtcctgagtttaagtcctagtaaccatatggtggctcacaaccatctgtacagctacagtatactcatatgcataaaataaataagtcttttaaaaaaagaaaaggaaggaagagagaaagagaaaggaaggaagggagggagagagagagagggagagagagagagagggagagagagagagagagagagacaaacagaccaaccaagcccatggaagttcatagctggatgggtggtgatggctcacacctctaaacccagttcttgggaggcagaggcaggtgcatctctgtgagtttgaggccagcctggtctacagagtgagttccaagacagccaaggttttaagatctgccaggagatctttcattgtctgctgtcacttgcacatgggttagcattcctgctgcttggttgagcagttattgtaatatcgaaagtgtcctgtttttagacaagcttgagagctgttgatctgggagcagagctggaccttaccctatgcagtaacccagctatgttcttggcaagaaaattagagcgaatctagatctgtctagaattgctggaacagacaacagggcaagcattcgcttatgaaaacctgggcatcaaccaggacagagtttccagagagcatcacccatactatgtctacctcttcatggaagagggctaagagagcccggtcacaacgaggctgcccaagtgggtaaagctttgcctgtgttataatggaaggctactccatgggtgatggttttcatctctatagaacatactaaaagaattgctgaacaataattacaaagggagacatttgcctagtgattgctagatgccagaccatgggagccacttttgtgccttatttttttatcacctcttcaagaaaccactgatgttactgttttctcattattctctttttattgatgggaaactgaggcacaataaggtcaaaaatgtttcttgatcaaaaatgttcagatcagaatatagataatttaaaaattctctgcttctagaatagtcttgtggacttttggctgatgtttaactgtgatttttggtcacattaaccctcatggattttcccttttctctttcagcatgtgaagatggatataggcttgaaaatgaaacctgtatgaggtaggctccctattcccttttcctgatgaagttgttacaaatgtcttttaaaaaacaaaaaacaaaagactggggctggagagatggcttagtggttaagggcattgactgctctgccagaggtcctgagttcagtttccagaaaccacatggtggcttacaaccatctgtaatggggtctgatgctctcttctggtgtgtttgaagagagcaatggtgtattcatagacattaaataaataaataaactttttttaaaaaaagatttagggtttgacgatattccagatgtgggagtcttcaggaatgtttaacctgtaacaaatagcttatcaataatcagtgatatagaatgaagtatgcttatttaaaacaaaacaaaaaacttcccagcagtgttggcatacatctttaatcccagcacccagaaggcagaggcaggtggacctctgaattccaggccggcccagtctacagagaggccctattttgaaaacacaaagaaaccctgttttgaaaaatgcctccctccccctccagaaaaagaaaaagaataaaagacagactatcctaatgaacccatcctaactaaagaaatttctcacatacgttgcctccttacagattttgttgtgatttgagactgagtcttctcttgtctctctcttgatttacagttgcccatttggcctcggtggactcaactgtggaaaccgtaagtgtcccaaaggagagaattgtgactgggtgtggccggccaggtttgctggcaggcaggctcctcccctctccactgtgcgcttaacgtctgtgctaagtgtgtgggaaaacaaacaaacagagagtaagccttgtgtggtgctttcccaagctcgaggggtaggggaagaaataaagacccctgcacagctctgcctgtgccgcgaacacagcaagtcacgcggggggtaggagccacagagcagagcccacacctaaaggataatgcaagactctcgtgaatgtttcccggaagtcgtggaattggagggaggttaaaaaagactgaacagatacatgggtgggacgagagtaagaagaacgttcctcatttagagtcttggggcaatcacatggtgtttggggaacactttacatgtgggtgtgtccaaattggggtggtgggggggggggacaggaagcacagcattgggtttgcaggatgcccaggaagagagccgttgggcaggggcggtactgaggctgcagtgggtgactgctaccggagctatccgtcatagcacaggggaattgcatgactgcagcgagcaagtgcgcctgtaccgcagagtcaggagacttccggtgcagtgcccgctgggcacaaggaccagcctgggacatgtgctgtgaggcagacttactccgtgaaggggagcatgcgcggtccaagccctgtcaagcatgctgataatgcagcaagcatgctgtctcaggctcctcttctctctgaggagcggtttgaggcagggtagatttgcttgcatgggtatttttttcgtcttcagatgcttttgaggtggaaattaccttcaaaattatgaaataaaccgggcgtggtggtgtataactttaattccagcactcgggaggcagaggcaggcgaatttctgagttcgaggccagcctggtctacaaagtgagttccaggacagccagggctacacagagaaaccctttctcaaaaaaacaaaaaacaaagttatgaaataaaatttgtgatacaggatatgggagagcctagtatgaataataggaatcaagacagttttaggatggctttgtctcatacaggtaaatgttcgaatggtaactatctaaagttggaagtaggcacaattttatttcctgtgtgttgtgtattgtctgacctcccccattactattcactacttgtatgtcccactttttatgtcttcaggatacctacctttgttctttttttttctatccttccttccttcctttcttttcttctttctttctttcctttttttttttttttttttgaaaaagtttttctatgtagcattggctagcctgaaacccactatgacaaggctagccttgaattcttagagattcccctgcctctgcctctgcctccgcctcctgagggctttctacatttgtgttcaagggaatagttatctttctagaaagtgaaattcatgcatgaattcacttcctgggttgtgtgcaattgatgtttattgttttgttgttttttgtttttgtttttgtttttgtttttgtttttgctatgaacagtcaccatttattttgtaagctcttgtggttaaaatcaaccccattgtttgtagggtctataaccaggatttctctcaggtccctgcggccacttttccctccccatttatccaagtgaccatcattatgtctagcagagggcagccccctcctggacggcagttggccccagcccacttcaggaatgaagctggcagtttgtcgttacactggggtgacttggagcaacatcaagttagtattatgaaacattttatggtgactaataaaaatgttatgacgtgatagcatgagcaggacacactgagacacatttgccagtggcctccttatctgaggtctgggcccagccctaggcatcggttatgaagttgggggggacacctgaatctctccccattggtgacagaagcacctgaggtatgttttgtgccaccttgctagcctcaaactcagcaaccctcctccctctgtctcttgagttctggggttataagtctgctccactgtgcccagcccatcgagctggattttccataggcaggaaacatctcggacagatttctccacacatgctgttctcaggcccagtaagagcagtaagccaacctcttccagatactgcatgacctctccttctacattcctggctgtcacccagttccagcatactctaggcaccagggtaatccgtgtcctgccttttaaaagtgttttgctagctctctagttctgcccaggctccacaccttgctgcctgtagaaaatatccttcaaaagggtaggatgtctttcccaaggctttagctttcgaggacatgcaggtcacccatatccaggctggggaccccaactagcttatcccttttctcttcttatgcagtatttgtctctgttaataccccaaagtccaacaattgtgtcttcttagccccttgtccagaattcttttctaaccagacctgtcttttgccttcttctgccccctcctcctctgctgttctcttaggcttgcacactttcttagttgcttgaatgttatgttggttgctctgcacaggtatatatcatcacacctgctgctttgagttgcttcaactttttcccatctcatgcatgcctgtttttatatatgtgtgtgtatatgtgtgtatttatgtatatgtatgtgtatatgtgtgtatgtacatatgtatgtatatatgtatgtgtgcatatgtatgtgtatatgcatgtgtttacttgttgaattgggatctagcctatctcccatactagcctaaaacctactttgtaacctaagatgacctcaaactcaacaatcctcctgcctcagccctctgtgtgctggggttataggcatgcactaccatgctggccactttttctctttttcaaattaattgtactttgccatagcatagaacagtgtaaaatcaattagagtagaggtgtaaggtaaggaaaggggagcctgcatgccatctgtcacccactacccactgcacaccgtctgcatgaggaccatcaggcatctgccacccagagttccagaccgcctcacgccatacccacggaatcagaatctggaaatttaccaaacccagcaacttgcttatgtgctgcgttgcatgcatcctacagcccgaagaacaggtgtcatccgagtggatgtacgtctcttttgcaaataattggacctcactgaagatactattttttaacctaaactcttaaagctatactatttttatttttttttattttatttatttgtttgtttgtttgtttgtttgtttgtttgttttgagacagggtttctctgaatagccctggctatcctggaactcactctgtagaccaggctggccttgaactcagaaatccacctgtctctgcctcccaagtgctaggattaaaggcgtgcgccaccactgccaggctgtgtttttttttttttttttaagctatactatttttaacttaaacttttaaagttaactttttaattcactttaattttatgtgttaattttatgtgagtgttttgcccacatgtatgtatctgcacagtgtatatacccagtatccacagaggccagaagagggcagtggatcctctggaactagagtcacatatgattttgagccaccttgtagtgccggcaatcaaacccaggtcctctggaagagcagctagtgttcagccatcttgccagccctgtcgcctgttttaatcatgcagtgacttaatttctacactcttactatgttaatgttaatactgccatactattctatactataatttccttctggctatcttttatgactcctttttaccgacttttcctcaaagccatttctcccacttatggttactgtcacttcatgactgcagaactcgcaccgttgtttctcattagtttcttcctaccacagacattttcatccatctcccttgcacaccccgttccacatgccctttgcttcaaaggctctggctttcataaatgcagtccctcccggctttgcagtaccagagcactccacttaaggatattcccaactgtcttccacccacccaaaacctggtatagaaagaacgtctcactttgctctccctgccatccatcgcatacagccacagggagattcagatcagaggaagggagcactgtgtgtcagcagaaatagctcagaacacacatcgctcagtgcgcatgtccggaaagccagagacaaagcaggaggaaagttgatcactaaccacccgcatgtcaatgctagctggcctcagctgggggctgccctttcccatcggaacttgaaggaagcaaggcatagggggagaggaatactattctgtatttgatatccctgtagcctggtgagatggaagggacagaaaccccagcagagagtgagtcacatggaaaattctcctaacggaggggagtagcaccctgcgattcacacacagcctggagactggagaaaggaagactccagaagaagaaaaggaaagccttgagtcaagttggaagaggatgggagacaaaactctgacctggtgtggttaagcaccgaatgaattttaaacgaaaaccaatacagcttcctaggaaggtctgttgtacagatgaaaggatgttcgtcgattaaagttctggagaaaggctgacaagtttaagcaaagtttattggaaggacgcgtcctaggacctgagtgtctgacatggctgggatcgctagcgtgggcagctgaggtcagaacttacagagcacacccaatcgggacccaatcgggactccgcctcctctctgcttttgcttcaggagactgtacacaggcttccttcccttcccagacttgtggtttagtcattttgaaagaaaacgtcctctctgcttcccacgtgagtctgggcgatgtgttcattcctcatcagcagtggctgagaatgtcaacgggagtgattctcccccacctccccgagagtgcacgggtggagggattaaacagttccgggaaggggtagggtacacagacaatgggtttcttccaaataaacctgtaaacaaagcttagagctcggaaggaaggtggtatccaaggttggtttggtgaaaaatgcaagcaaagattacagcctcaagctgagaggatggcactggccagcactgaactaccaacacgtgttcgtggggaaggaggcccaaggagcccagctctctctgctgcatctcctcacactagaaagcacaggacagagatagcgtttgttcctgtctcaatcccacggaaacactcacagcacccctccacggccagaagccaacatgacagttggtgctggggaagaaagagcccatgaagccccatgtcacagaaagcagaagtgagcacttgcacctgaaatgattctgtaagacattgcccttggcagagatgggtaagggtctatgacatctcttcatcctcttaccttttattattatttcttttatttaaaatatttaatttgcatacccactttcaagattcacgttggcatttttcaaacataattcttttaggttctttttacctgatgaacccctcaagtccctcccacctcccatagactcctttcctgttgtcatctgtgtcctgtcagctcccccttaactcttagctgtcccctttcactgtctcctttttggttttataactcacctcacatctattcctagccccacatacaaacattacacattgggatcacttagtatattttccaactccatccgtgttagtgcaagtctcatgctgccatagcacacacacacatagaagtgttcacattactgtgacatccaaacatgggggcctttacaaacagaatattgctgtgttttaccaatatgttggtcctcagtgaataccattagaagaagaacaacaggcagtgtatggtagttgatacctaaagggaaagatggggaagtgagtaaggttttattttgtttatttaaaaagctatcctgccaggtatgctggcacacacttgtaagtctagtatttggaaggttgaaggaggaggatcatgagtgtgaggccagcctgggctacatggtgagttccaggctacccttggctatatagccagagttgttccctactccttctactttcatgccattcgtgtgtgtgtgtgtgtgtgtgtgtgtgaaatgcatatataatttttaagtttaggtttctcatatgagagaagacagacaatatttatatttctgagtctggtttatcttatgctatacggttccatctgttttcctacaaagtatattggtttgtggctttttttgttttctgttttgtttttttttccagacaaaactatttcaaagaggaatgtaacctgcggcctcttgtaaagatcactgctatcatagatatttgcctgttttgctataaatgagaaaacttagtttaatgtgtaggataaaaattaaacttttatgtttgtttttttgagacagggttgccctggctgtcctgaaactcactctgtagatcaagttggccttgactttacatatatcttcctgtctctgcctctgagtgctgggattaaaggcatgcatcaccgttgcccagtttagattttgctttttaagagaagaaaaagctgggcatggtagcacatggctgtaatcccagactcaaacaggaggatcatttcaatttagaacctgcctgggctacatagtaagtgtaagtataagctactaggctaatgagagcctatctcaatttaaaaagacagccaggcaatggtaatactcacatttaattccagcacttggaaggcagaggcaggtggacttctgagttcaagaccagcctggtctacagagagatttccctgatagcacacacatatacaacaatacaaacaaacaaacacccccccccccaaaaaaaaaggccaggggagccaggcatggtgacacaggcctgtaatcccaacacttgagagatagagaggcagaaagcacaagttcacagccagtcttggctacctgtccaaaaagggggcacagggcacagagaaaccagatgtgattgcctgtaaccccagcactctgaatgtagaggctagcaggagttcaagggcatccttggctaaatagtaatatagaagcccacctgggctatccatgactctttgtttcaaaaatgaaaataagtaagtaaataaataagtaagtagagcactgggagccaccaaagtctcttaaaagaagaaacagcaaggtcagacttgctgtccagagaagacatgacaggagctcagggcagagctggtagagatgccggctggaaagatggtgtggggttaagtacacgagctgctcttccagaggactagagttcaagccccaacttgggttgttcacaactccctgtagctccagctccttggggtctgccaccctcttctggcacatacacaaagcacacacagacacacgcatacaaatatacaaatgatttttaaaaattctttaaaagggatgggggtgaggactgaagtgatggcttagtggttaagagcaccaaggttctattcccagcacccacataatggctcacaaccattcgtaactccagtttcaagaaatccaatgcccatttctgatctccatggtcagtgatgcataatataggtatctattaattaagtgcataaaataaatatttttttttttaaaaatgaacaatggctacttcgaagaggcttgtcttttcactcacgtgtgcacacgtgtgcacacacactaatatatgaaattgaagataattatgtaaaagttataatacagcaggagttgacacatacgaaggatatctggacgcatatatcagagtcaaggaagaagagggacacatcccatgatttgaccttgttccctctatattgcagaactaatctttttcataataatctggcctctttgtggcttgtttaaataaaaggatagataaggggtgcatagcttatcgtctgcatgttctactcatagcccctgatctatgagttcatccagacaggacaagagcaggagagctgtgccatggccttgactttataaccatgcctgcagatcatggatcagtcttagaacactttaaagagtctggttatgccgggcgtggtggtgcactcctttaatcccagcactcgggaggcagaggcaggcggatttctgagttcgaggccagcatggtctacaaagtgagttccaggacagccagggctatacagagaaaccctgtctcaaaaaaaaaaaaaaaaaaaaaaaagagtctggtcgtttggggctagagagatggctcagtgggaaagagcacaggtctgctcttacagaggatctgggttccactcccagaatctacgtgatggctcacaaccctctgtaactgtcccagcggatcctgatgtccttacctggtctctttggtcacagacaaatagttgaataaaacattggtaatgaaatataaaatgtgtattttttttaaaaagaaaaaaatctagttattggtctttcaaactagatcttgtaacctgagaaaccaattttaattttatatccatacaaaaatagaaaatttaatataatctatcataaattttgctacaatatacagatataaaacccaactaattagatatgttagcattattatatataatatatgcttctatcagtgctaatttctggtaattaaatcaatgtataaggagcctcctgtgtctctggcatgctttacacagtgaacccagactctggacttagcagacgtaacatttcttttgaaattgaagagtttaacctgtctctgttctgttttaccaagtaagactctaaaactgaatcaaacatctggtgttttgttttgttttgttgaagcagggtctcactgttgccctggcttggctggaactcaccatgcagatcaggctgcctctgcctccagggtgaagcacaaatctttatcttcactaattaccatcaagataaaaagttaaatttccagatgtataattttcacgtgataaaaagcaagcacccaagtgagagggggaataagagtaaagtctttcagaacagtttggggaaacttgatggttgcctgtctcttttctggtttagtgacgtcattaggattgctctagagaaagaaatttggagctgaaagagggaatcctctcactgcaaagaaagcagaactctagccttggaggatctctgggccagagagcaggcagtgggagagagcagctagggccatgctgcggaggtggggtgggtggaggcttacttaggactgaggacctcctgccaatcagccctgtttgtttttttttcctttgtcttctgtgtttagcctatcagctcatcactgtggtgatcgcagccgcaggaggtggcctcttgctcatcctgggcgtggcactcattgttacctgttgcaggtgagtggtgagacctctcatttagatccccctttcaggacctgtgctactatgcgaaggtggattctgaaccttgggtaaactagcacttgggagactgaggcagaaggaagatgactctgaggacagcctgggtttatagcaggttctaggcaagcctggactacatagtaagaccctgtctccaaagcaacaaaataaaaaggactttatcaaaatcaaaaacaaactctggagctgaggacatggctcagttagtagagcgcttgcctagcgtgcgtgaagccctgcgcatgctccgcggccatgcagaaccaaagaacaaagcaaagtgtcgtccctgcgcatgctccgcagccatgcagaactaaagaacaaagtgttgtcctccttatgatcccagcccgggatggaaaggcaagaagaatcaagaattcaaaatcatccttagctataaagcaagtgcaaagccggccaggaatacaggcagctgttttgttttgttttgttttgtttttttaaaatacaaccaaacttgttcacacacatttttaatcccagcactcaggaagcagagacacttggatctcctaggtcaacctagtctacatagtgggttccaggttcccggacagccaggactacgcagcaagaagtgtctttaaataaataaataacagaaaataaggaatgttgatgagaatgtggcagaattggagtccttaggcacacatggctggcagggatagaagaaagaaaagcagctttgaatgtctggtaaacccaggactcccagtcccaggagatgcttatgagtcatctacacaagaacttggacctgggtattcacaacagtcctattcctgagagtcaaaagggggtggggaggggagcagtcctagcgcctacgggtacaaaacccagatgtgacagagccacattctgtcagccaccgactgacacatgtgaaccttcaaacccttgttctcagggaaacgaggcatctcaaaagatcatctgaagtgcgataggaataggagttataagagtctctgcatctaattgagacagaaagtaggccagtgggaatctagggcagaggtcagggtggagaagttgggcaactggggttgattgataaggggtctgagacttctggaggtgacaatggtcacaccactgtgaatatgttttaaaaaaaattttatgagtacattgtatggtttcgtcagtcgtctcagagctgtgtgtgtacagagagaagcagacagaggaaggaaaggaactacctgaactattttagcagtaaaaaagtaggaccttttttggatgaacctcagctccaggcttcctgcaatagagtttccatgaggaaggaagggaaagaaagaaggaattcccccttgtctcaattatctgttcaagtaaaggaacattacagtcattgatttagatgataccaaaaggaaagaattatttgtacgtgacagctggagggacctttccaaaatcgctagttatcttttttgtgtgtgtgccagtgttaaagagacattttaaggcatcctcggcctccagaaaggccgccgagaataatcaactgcctttaagtatcccttcgtagattaccattaaaggtaaacgtgaccccgttgagggcagttacccagagaaacagagcctggcagctggggcacatgggccttgcattggcaacattctctaccacagccgtgtagtcgttttaggagggaacctggactcttggttagtgaatgggaagcggtggcagcctgctctgagcctggaggaagccagcactgaaggcagagtcgtttctgtgcttttcccagggacttaaagtgctgaagaaggaacaacagccttcaaagcctcaaagaaacataattgtttctgatccttggttgtcttagggtttaagaccgttgtcttaaccatagctaagccataaaacctcacagtttctgagctcctgaaaggacaacgtggagagtctgtaagcaggtgccccctcctcctgaggtttttgtggtttgttaagttgtaaataaaacattggctgcggagaggagaggccagctccatcccaggtcactagtagccacctggtgagccaggggctaagtcttcctaagccagagccaccctgtgttctgccccccccccccattctggaaacgcaagcacagcactgatgcttcacctgtggcttctgatatttaaccatcacggagttgctgtccctccatagtctgtgaacgctgattcctgtctccctggctaccccaagggcacagcgccctcttctcccagaggacaggacactaacagctcctccagggtcatcttcatgccccctttagactctttacattgggaaaatcttttttgcatctttttttgaatggcagaggggactcctcatggcagttttagtgttttagtcaaatactaaattatactaggttcccagtcttatttacattgcaaatgacactcagtcttgtcgaagatgtcatgtcttgacacaacctattgatagaatcttgttgcacattttttttaattctcacagaaagagtaaaaatgacataagtaaactcatcttcaaaagtggggacttccaaatgtccccatacaccgatgtccccaagaatcctcgctcgcaagagtggggccgagaagccattgaaatgcacgagaacggaagcaccaaaaacctcctgcagatgacagacgtgtactactcggtaggtgtctgtggcagccggcttcagggctccccagctcaggggtcaccggaaggctttaccggaacggtgacgtcagcctctaagacacactgcttactgattgttcggtttagtggtggcctggtgacatggagttcttcagtgtgagtatgagggacactgccacagagtaagttacttttagggagtgggagtcataattcccaaacttagctttaagaataggaacagaagccgggcatggtggcgcacgcctttaatcccagcacttgggaggcagaggcaggcggatttctgagttcgaggccagcctggtctacagagtgagttccaggacagcgagggctatacagagaaaccctgtcttgaaaaaccaaaaccaaacaaacaaaaaacaaaagaataggaacagaaacttcagagggagaaagtcgctccagccccttgccctcctctctctgttatctcctttgctatcttgaatctcatctcctgggctttgtcagtcaaaactctgggctgggagaggcatagcaagagagactcaagactatcttcaccatgtaggttttagaaactcagtaggtctttaataattggctcccctagcccagccacatcagtgtgaaagctgagagcttaccttaagccagtggttctcagccttcctaatgttgcgcgacccttaaacacagttcctcatgctgtgattcccccaaccataaaattatttctgttgctacttcatggctgtaatttttctactgttatgagttgtaatttaagtatgtgttttctgatggtctgagacaacccctctgaaaaggtcatttgacccccacccccacccccccaaggggcaagactaacaggttgagaaccactgctttaagcttctcctgccctgcacggaagataacacagctcttatttctattccatttgattcgtctttaattacaccgcgtcagccataaagcagacacaaatggggctatctgaaccgaaagataaacagatgtcaggtgaccgctaatcagtctgctgtatggcaataaacgtgagaccttgtgctgtggcggcttactggcactagacatttcactatagaaaccataatccctcttgttgctatggagattaatcaggaggatcagactttggatgggaggggcgggtttgttccagggtgctctttgaaaattttcagccaggaggaagaacaagaaaggtggatataataaagatgaatgaacctctctatttaaactctagttaaatgtcctgtttctaaacaggcatcagcttttcctttccgtcagggacgcattttcccttccctaaccaaagctgtactaagtgtgtccgagtcccatgtgctttgctagggactcctcagccctggggtggaatggtgattatagcaaacaagtgggctatctcccatgaccaaaaagaaagttggggaggaaagggtttatttgacttccacattgctgttcattaccaaaggaagtcaggacaggaactcaaacaaggcaggaacctggagacaggagtcaatgcagaggttgtggagggtcgctgcttactggcttgctcaccctggcttgctcaacctgctttcttatagaacccgggaccaccagtttagggatggaaccacccacaatgggctgaaccctctcccgtcagtcactaattgagaaaattccttacagctggatctcatggaggcattttctcagttgaggttccctctttttagatgactctagcttgtgtcaagctgacctaaaactagccaggacaagtcctatcttccctttttagaaacagaacctgagtttagaccacgatgctatcacctgagtgccattgtctctcacagtgggcacaaagtggtccaggcagcaccaccctggctctcataggtatcgtgtttgtagtgcacacactctctcataggtatcgtgtttatagtacacactctttggtattttgcctctaccaaaaaaaaaaaaaaaccacttatctctgatgttgcatgaggacttcccagtgcttcagatacctggcctgactaagttttttttttttaactcccttttaaaataaatttaaaatccctgctaggcataatggtacatgcctataatcccagcatacagtaggaagaggtaagattgtgggggcagctggagagatggctcagcagttaagagcactgactactcttccagaagacctgggtaggagcttacaactgtctaactttagttccggggcatctgatgccccctcttcaggcctctgtgagaaccatgcaaacaagtggtgtacagacatatatgcaggcaaaacactcatatacataaaataattctcagaaaaaataattcaaataatatttttaaaagaaggcagccaggcgtggtggcgcacgcctttaatcccagcactcgggaggcagatgcaggtggatttctgagtttgaggacagccagggctatactgagaaaccctgtctcgaaaccccccccccaaaaaaaaaaagaaggcgattgtggggctggagagatggcttggcagtggagagcactggctgctcagcttgaggacccaggttcaattcccagcacctacatagcagctcattccagttctagaggatctgacatcctcatctggctttccagacactgagtccatgtggtacattctcatacatgcgggcaaaaacgcccatacacgtaagggaaaaaaaaaaaaaaaagaaaagaaaaggaggaggaagcgaaggagggagagactttgagttccaggtcaccaggaacaggcagcatgattagcggtcctcccctcctctcccaccccaccttatctgaatacacaaattgacctgtgtgggttgtgcttcagggtgaggcagtgctttgctacttatgggtcgccccatttacgttaattgaaatgtaaaaagttttacgtgtactttagtctaggaataattgacctctctccttttcggttggcctccagcccacaaacgtaaggaaccctgaacttgaacgcaacggactgtacccagcctacactggactgcccggatcgagacactcttgcatcttcccgggacagtataacccatctttcatcagcgacgagagcaggaggagagactacttctgagtccaggagacagagggaggcccccgtttctctgagccacttccccggacatctggctcagagcactacacccccaaaagggagcaccatgcactagctgctcctgggactccgcagagccacgcttgaggggcgtggccacagtggaagggaaagacggaggcggaactgcaggccactcgttcagcactgttgttactgtgaacatggtcgtgggccagtaccgagtctcagaatgcctgacacaacacgtagaacgtagaacgggatgccttccataactgaccactaggcttcatttccaggacccagtttccctttaatttgcactttaatagattgggctgggacacttccacactgtgtcgtagaggcctagcaggcgctgcagtcgggtgcaaagtattttaaggtttctaggttgtccgtgctcatttccaagccaatgccataaatgagaccttgacatttgcaaggctcaacacaaagcttttttatgtcaaagtgacacatttgcttacaatgtattagttttactttcccaagcaagtatgaatcggggcaaaacaacattcctttgaatttctttagaagcatccaggtgtcccttaatgtgtcccagcagggcagtatcagtcaggacctacatgtggtgaggtgtttttgacccatgggggaattgcatggggcctgaggctctaaccatcaatgtggagccagagtctgcagggtgtagttgaaaaaggagaggcagttgcaggtgtgtctgagctggtgtctcacctccagagggaaagcagccagctgtaggccccacaattgggcagaggaatgaacgagtaaactgatacattccccgaactccagtgcagaagttggggagctaggaggaagccaccggcaaggatgcatgcctgccaatcttccaaaccataatgttgcccaccaactcaacagaaacttttaaccacttaaaactacttattcactgaggagagaacttatttactct

SEQ ID NO: 300 - DNA, 3346 bp, Mus musculus
cggccgccgccaccatggccacgccgcgcgccccgcggtggccgccaccgtcgctgctgctgctgctgctgctaccgctgctgctgctgccgcccgctgcccccggggcgcggggctcccttccctccccggcccatcgaacactcctcccggtcgcgggaccgctttcgccgcctggcgccggacatacggcccccggacccggcgtcgcgacccggcggggacgttccggccgtgtccccagaggcgtgagcgcggccttggagagccttcctgagtcacccagcagttccaggtcacaaagaagaatcacaccttctcaaacagagagtgggacatccctaggcttcctggagaggacgagggagctcccagaagaagggactgtgcacacgcaagtggctggcacctgggtgtcccgccaagcctcccaccctgctctggaacctggggagccaactgtgctctcccagaagagaaattcatccggccaggaacactccgggccaccattctcctggagtcagagtcaccctcctccctcagaccacccatcgtcttctggaagtattaagaatggtaataatttcaccgctctccaaaacccatcagtcacccagacaaagagcatgcttatcactgacacatacactaatggcgtcccaagaactctgcggtctctgcccgttggtgtggaccctgcagatgagacagagggtttccctgagcactccagacttggtataacttcaatgtcagtccgctcttcaccctctgtgaaggactcaaggacaaacagtggactaactgagcatctgggagatggagaaggcactgagctgtctacagaaaatggatatggacttccatctatacactggcaaagtgatgccccctccttcggaggacgtcagcttgccagcagctcagaagcgggcgatggaagggccatgcctctgactgaggctgtgtttagatcagacccctccattggtggtggagagagcaccggacgatggatcctcaccaagaagaaaacatctacagatgcggcagaaagctcagctttgcatccagaagctgggggtgctgggggcttgactcagtcctcacacgctgcacaacagccccgaggtggcggcgaagactcagggatgggtgggaggagttacgcagagtcttcatcttcttcttcatctacatcttcttccgaaagtctggattcctcagcacctctcagagagcattctcctccggaagatggtgcaatgctgagtgacagctctgatctggcagacagcacttcgggggctcgcacacctcacacgtctgcaatgtccacccggagcggggagcgcacgctgcggtcccttgacctctcgagtgcagcaacccgccctgcgcgccccactccacgagggaacgtgacagagcacgctggcctgctgtccggggcaccaactctcggagtcaccggacttagctacactcgagaacatggctcagacgctgggcagaggacttccagtgaccacacagaccacggctatgttccgtctactttcaccaaaggagaacggacgctactgtctattacagataacacctcctactcagaggccagcgagagctcaacctcttccgttaagatctcagactctccttctcaggctcagcctaaacagagtagcatgtcctccgacgatgacgagcctgctcagtcttccacagagtcaccggttctgcatacgtccaacctgccaacctacacgtccactgttaatatgccaaacaccttggttcttgataccggtaccaaacctgttgaggacccatctgattcacgggtgccttccactcaaccctcaccgtcacaaccccagccattctcatcagccttaccatcaaccaggtctcctgggtctacctctgagacaaccacatcctcaccatcaccttcacccatctccttactggtgtcaactcttgccccatattctgtctcacaaacaaccttcccacatccatcttctaccctagtccctcacaggccaagggagccacgtgtgacttcagtccaaatgtcgacggcaatatcagccattgcattgatccccagcaatcaaacagcaaaccccaagaaccagagtaccccacaacaagagaaacccatcacagaagctaagtcaccaagcttggtgtctccgcccacagactctaccaaagcagtaacagtgagccttcctccaggggccccttggtccccagccttaacagggttctccacggggccagcccttccagccacaagcaccagtttagcccagatgtctccagctttgacatctgccatgccccagacgactcactctcctgtgaccagtcccagtactctgtcacatgtagaagctttgacttcaggtgctgtagttgtgcacactaccccgaagaaaccacatctcccaaccaatcctgaaatcctagtgccacacatctcaactgagggggccatcaccacagaagggaaccgggagcatacggatcctaccactcagccaatccctctgaccacttcaaccacgtcagcaggagaaaggaccacagagctgggccgtgcggaagagtccagtccatcccattttcttacaccatcttcacctcaaaccacagatgtttctacagctgaaatgttgacttccagatatatcacctttgctgctcagagcacctcacagtcaccaacagccttgccacctctaaccccagtcaacagctgtaccgtgaacccttgtcttcatgatggcaaatgcattgtggacctcactggccgtgggtatcgatgtgtgtgcccgcctgcctggcagggggagaactgcagtgtggatgtgaacgaatgtctctccagcccctgtcctcccctagccgcgtgcaacaatactcagggatcgttcacctgcagatgcccagtcgggtatcagttggagaaaggaatatgcaatctggttagaacctttgtgaccgagtttaagttaaagaagacttttctcaatactactgcagaaaaccattccaacactcaagagcttgaaaacgagatcgctcaaacactaaacgtgtgtttttcaacattgcccggttatatccgaactacagcccatgtgtctagggagcccagtacagttttcatctcactgaaaaccacctttgccctggcctccaatgtgacactgtttgacctggcagacaggatccagaaatatgtcaactcctgcaggtcctctgctgaagtctgccagctcttggggtctcagaggcgggtctttcgagatcttctctaggttttgcc

SEQ ID NO: 301 - protein, 1099 aa, Mus musculus
MATPRAPRWPPPSLLLLLLLPLLLLPPAAPGRSLPSPAHRTLLPVAGPLSPPGAGHTAPGPGVATRRGRSGRVPRGVSAALESLPESPSSSRSQRRITPSQTESGTSLGFLERTRELPEEGTVHTQVAGTWVSRQASHPALEPGEPTVLSQKRNSSGQEHSGPPFSWSQSHPPPSDHPSSSGSIKNGNNFTALQNPSVTQTKSMLITDTYTNGVPRTLRSLPVGVDPADETEGFPEHSRLGITSMSVRSSPSVKDSRTNSGLTEHLGDGEGTELSTENGYGLPSIHWQSDAPSFGGRQLASSSEAGDGRAMPLTEAVFRSDPSIGGGESTGRWILTKKKTSTDAAESSALHPEAGGAGGLTQSSHAAQQPRGGGEDSGMGGRSYAESSSSSSSTSSSESLDSSAPLREHSPPEDGAMLSDSSDLADSTSGARTPHTSAMSTRSGERTLRSLDLSSAAWARPTPRGNVTEHAGLLSGAPTLGVTGLSYTREHGSDAGQRTSSDHTDHGYVPSTFTKGERTLLSITDNTSYSEASESSTSSVKISDSPSQAQPKQSSMSSDDDEPAQSSTESPVLHTSNLPTYTSTVNMPNTLVLDTGTKPVEDPSDSRVPSTQPSPSQPQPFSSALPSTRSPGSTSETTTSSPSPSPISLLVSTLAPYSVSQTTFPHPSSTLVPHRPREPRVTSVQMSTAISAIALIPSNQTANPKNQSTPQQEKPITEAKSPSLVSPPTDSTKAVTVSLPPGAPWSPALTGFSTGPALPATSTSLAQMSPALTSAMPQTTHSPVTSPSTLSHVEALTSGAVVVHTTPKKPHLPTNPEILVPHTEGAITTEGNREHTDPTTQPIPLTTSTTSAGERTTELGRAEESSPSHFLTPSSPQTTDVSTAEMLTSRYITFAAQSTSQSPTALPPLTPVNSCTVNPCLHDGKCIVDLTGRGYRCVCPPAWQGENCSVDVNECLSSPCPPLAACNNTQGSFTCRCPVGYQLEKGICNLVRTFVTEFKLKKTFLNTTAENHSNTQELENEIAQTLNVCFSTLPGYIRTTAHVSREPSTVFISLKTTFASNVTLFDLADRIQKYVNSCRSSAEVCQLLGSQRRVFRDLL

SEQ ID NO: 302 - DNA, 2770 bp, Mus musculus
gggcggccgccgccaccatggccacgccgcgcgccccgcggtggccgccaccgtcgctgctgctgctgctgctgctaccgctgctgctgctgccgcccgctgcccccggggcgcggggctcccttccctccccggcccatcgaacactcctcccggtcgcgggaccgctttcgccgcctggcgccggacatacggcccccggacccggcgtcgcgacccggcggggacgttccggccgtgtccccagaggcgtgagcgcggccttggagagccttcctgagtcacccagcagttccaggtcacaaagaagaatcacaccttctcaaacagagagtgggacatccctaggcttcctggagaggacgagggagctcccagaagaagggactgtgcacacgcaagtggctggcacctgggtgtcccgccaagcctcccaccctgctctggaacctggggagccaactgtgctctcccagaagagaaattcatccggccaggaacactccgggccaccattctcctggagtcagagtcaccctcctccctcagaccacccatcgtcttctggaagtattaagaatggtaataatttcaccgctctccaaaacccatcagtcacccagacaaagagcatgcttatcactgacacatacactaatggcgtcccaagaactctgcggtctctgcccgttggtgtggaccctgcagatgagacagagggtttccctgagcactccagacttggtataacttcaatgtcagtccgctcttcaccctctgtgaaggactcaaggacaaacagtggactaactgagcatctgggagatggagaaggcactgagctgtctacagaaaatggatatggacttccatctatacactggcaaagtgatgccccctccttcggaggacgtcagcttgccagcagctcagaagcgggcgatggaagggccatgcctctgactgaggctgtgtttagatcagacccctccattggtggtggagagagcaccggacgatggatcctcaccaagaagaaaacatctacagatgcggcagaaagctcagctttgcatccagaagctgggggtgctgggggcttgactcagtcctcacacgctgcacaacagccccgaggtggcggcgaagactcagggatgggtgggaggagttacgcagagtcttcatcttcttcttcatctacatcttcttccgaaagtctggattcctcagcacctctcagagagcattctcgtgagttcttagtgcatggaaatagacacagggtcttaggatgtgtttggtccttcgatctaccaaagcatactttaggaaaggaatttcactattcccaggccattattctcttagctgattaatacaaaattgctccatgctttaccaaagcatactttaggaaaggaatttcactattcccaggccattattctcttagctgattaatacaaaattgctccatgctttttgtctggtacatttcaactctttttctaggtgagtgtgtgtgtgtgtgtgtgtgtgtgtgtgtgtgtgtgtgtgtgtgcaggttcacaagtgcacagatgcaaatggaggccaatggtcaacctctcccattgttcctcagaagcgatcggctttcttttggagacaagtctctcccttaggcttgggactcactaactcaataaggctatctgcttgtccctggtgtgaagcatataggagcatgctgtcatgctctgcttctgatgtgagcactaaggatccaactcagctccttgtttatgcatagcaagagctttgttgactaagccacctccccagccccacatctaaggagctcctggtaccacctcctcttctctcagatagaactcagggtcttctgtgtccacacccccatagtatagcctgctctaaacccaatacctcctaatgacagaacttgtggatatttcctgtagaagcaatcatatcatacatggccttggttcacatggccttagttcatcaaacatgtatctgtacttctgagtagtaccctgtcagggatgcattattatttacagtgtatctgtgattgttcagggacacattctatgcagatacatgctgtcttgaaattactaagttatatagtagtatcctttctaagtttttatgaaacttgccaatctattttccaaagtgagtgtgtgtttgtgtgtgtatacacacatatagagagtgatacaaatctgcatttctcagttcattatacaagtgacaatgaacatctactcaggtagtaattgctaatgagtgtgacttctttgaagatgcccatttgaatatttttatattttaaagttaagctgccactttttgcattgagtataaggtgttttgttttgttttgttttttaaatatcctggacactagtctcttcagatatttataactcactctactttctcctgttctgtactttgttgattttactttttaaatttttatttatttttattttatgttcatcagtgcttcaccggcatgtatgtctaggtaagtgtgtcaaatcccttggaactcaagttacagacagctgtgtgctgccatgtacccactggctgggaattgaacctgggtcctctggaagagcagccagtgctcttaaccactgagcaatctctgtagcccatcatttttgctttctgatggtattattagagcgtgaaaatgtttaattttggtgaagtctaatgtggacattttagaacatttgtt

SEQ ID NO: 303 - protein, 451 aa, Mus musculus
MATPRAPRWPPPSLLLLLLLPLLLLPPAAPGRSLPSPAHRTLLPVAGPLSPPGAGHTAPGPGVATRRGRSGRVPRGVSAALESLPESPSSSRSQRRITPSQTESGTSLGFLERTRELPEEGTVHTQVAGTWVSRQASHPALEPGEPTVLSQKRNSSGQEHSGPPFSWSQSHPPPSDHPSSSGSIKNGNNFTALQNPSVTQTKSMLITDTYTNGVPRTLRSLPVGVDPADETEGFPEHSRLGITSMSVRSSPSVKDSRTNSGLTEHLGDGEGTELSTENGYGLPSIHWQSDAPSFGGRQLASSSEAGDGRAMPLTEAVFRSDPSIGGGESTGRWILTKKKTSTDAAESSALHPEAGGAGGLTQSSHAAQQPRGGGEDSGMGGRSYAESSSSSSSTSSSESLDSSAPLREHSREFLVHGNRHRVLGCVWSFDLPKHTLGKEFHYSQAIILLAD

SEQ ID NO: 304 - DNA, 4969 bp, Mus musculus
gcggccgccgccaccatggccacgccgcgcgccccgcggtggccgccaccgtcgctgctgctgctgctgctgctaccgctgctgctgctgccgcccgctgcccccggggcgcggggctcccttccctccccggcccatcgaacactcctcccggtcgcgggaccgctttcgccgcctggcgccggacatacggcccccggacccggcgtcgcgacccggcggggacgttccggccgtgtccccagaggcgtgagcgcggccttggagagccttcctgagtcacccagcagttccaggtcacaaagaagaatcacaccttctcaaacagagagtgggacatccctaggcttcctggagaggacgagggagctcccagaagaagggactgtgcacacgcaagtggctggcacctgggtgtcccgccaagcctcccaccctgctctggaacctggggagccaactgtgctctcccagaagagaaattcatccggccaggaacactccgggccaccattctcctggagtcagagtcaccctcctccctcagaccacccatcgtcttctggaagtattaagaatggtaataatttcaccgctctccaaaacccatcagtcacccagacaaagagcatgcttatcactgacacatacactaatggcgtcccaagaactctgcggtctctgcccgttggtgtggaccctgcagatgagacagagggtttccctgagcactccagacttggtataacttcaatgtcagtccgctcttcaccctctgtgaaggactcaaggacaaacagtggactaactgagcatctgggagatggagaaggcactgagctgtctacagaaaatggatatggacttccatctatacactggcaaagtgatgccccctccttcggaggacgtcagcttgccagcagctcagaagcgggcgatggaagggccatgcctctgactgaggctgtgtttagatcagacccctccattggtggtggagagagcaccggacgatggatcctcaccaagaagaaaacatctacagatgcggcagaaagctcagctttgcatccagaagctgggggtgctgggggcttgactcagtcctcacacgctgcacaacagccccgaggtggcggcgaagactcagggatgggtgggaggagttacgcagagtcttcatcttcttcttcatctacatcttcttccgaaagtctggattcctcagcacctctcagagagcattctcctccggaagatggtgcaatgctgagtgacagctctgatctggcagacagcacttcgggggctcgcacacctcacacgtctgcaatgtccacccggagcggggagcgcacgctgcggtcccttgacctctcgagtgcagcaacccgccctgcgcgccccactccacgagggaacgtgacagagcacgctggcctgctgtccggggcaccaactctcggagtcaccggacttagctacactcgagaacatggctcagacgctgggcagaggacttccagtgaccacacagaccacggctatgttccgtctactttcaccaaaggagaacggacgctactgtctattacagataacacctcctactcagaggccagcgagagctcaacctcttccgttaagatctcagactctccttctcaggctcagcctaaacagagtagcatgtcctccgacgatgacgagcctgctcagtcttccacagagtcaccggttctgcatacgtccaacctgccaacctacacgtccactgttaatatgccaaacaccttggttcttgataccggtaccaaacctgttgaggacccatctgattcacgggtgccttccactcaaccctcaccgtcacaaccccagccattctcatcagccttaccatcaaccaggtctcctgggtctacctctgagacaaccacatcctcaccatcaccttcacccatctccttactggtgtcaactcttgccccatattctgtctcacaaacaaccttcccacatccatcttctaccctagtccctcacaggccaagggagccacgtgtgacttcagtccaaatgtcgacggcaatatcagccattgcattgatccccagcaatcaaacagcaaaccccaagaaccagagtaccccacaacaagagaaacccatcacagaagctaagtcaccaagcttggtgtctccgcccacagactctaccaaagcagtaacagtgagccttcctccaggggccccttggtccccagccttaacagggttctccacggggccagcccttccagccacaagcaccagtttagcccagatgtctccagctttgacatctgccatgccccagacgactcactctcctgtgaccagtcccagtactctgtcacatgtagaagctttgacttcaggtgctgtagttgtgcacactaccccgaagaaaccacatctcccaaccaatcctgaaatcctagtgccacacatctcaactgagggggccatcaccacagaagggaaccgggagcatacggatcctaccactcagccaatccctctgaccacttcaaccacgtcagcaggagaaaggaccacagagctgggccgtgcggaagagtccagtccatcccattttcttacaccatcttcacctcaaaccacagatgtttctacagctgaaatgttgacttccagatatatcacctttgctgctcagagcacctcacagtcaccaacagccttgccacctctaaccccagtcaacagctgtaccgtgaacccttgtcttcatgatggcaaatgcattgtggacctcactggccgtgggtatcgatgtgtgtgcccgcctgcctggcagggggagaactgcagtgtggatgtgaacgaatgtctctccagcccctgtcctcccctagccgcgtgcaacaatactcagggatcgttcacctgcagatgcccagtcgggtatcagttggagaaaggaatatgcaatctggttagaacctttgtgaccgagtttaagttaaagaagacttttctcaatactactgcagaaaaccattccaacactcaagagcttgaaaacgagatcgctcaaacactaaacgtgtgtttttcaacattgcccggttatatccgaactacagcccatgtgtctagggagcccagtacagttttcatctcactgaaaaccacctttgccctggcctccaatgtgacactgtttgacctggcagacaggatccagaaatatgtcaactcctgcaggtcctctgctgaagtctgccagctcttggggtctcagaggcgggtctttcgagcgggcagcttgtgtaagcggaagagtccagaatgtgacaaagagacctccatctgcaccgacctggatggtgtcgcgctctgtcagtgcaagtctggctacttccagttcaacaagatggatcactcttgccgagcatgtgaagatggatataggcttgaaaatgaaacctgtatgagttgcccatttggcctcggtggactcaactgtggaaacccctatcagctcatcactgtggtgatcgcagccgcaggaggtggcctcttgctcatcctgggcgtggcactcattgttacctgttgcagaaagagtaaaaatgacataagtaaactcatcttcaaaagtggggacttccaaatgtccccatacaccgatgtccccaagaatcctcgctcgcaagagtggggccgagaagccattgaaatgcacgagaacggaagcaccaaaaacctcctgcagatgacagacgtgtactactcgcccacaaacgtaaggaaccctgaacttgaacgcaacggactgtacccagcctacactggactgcccggatcgagacactcttgcatcttcccgggacagtataacccatctttcatcagcgacgagagcaggaggagagactacttctgagtccaggagacagagggaggcccccgtttctctgagccacttccccggacatctggctcagagcactacacccccaaaagggagcaccatgcactagctgctcctgggactccgcagagccacgcttgaggggcgtggccacagtggaagggaaagacggaggcggaactgcaggccactcgttcagcactgttgttactgtgaacatggtcgtgggccagtaccgagtctcagaatgcctgacacaacacgtagaacgtagaacgggatgccttccataactgaccactaggcttcatttccaggacccagtttccctttaatttgcactttaatagattgggctgggacacttccacactgtgtcgtagaggcctagcaggcgctgcagtcgggtgcaaagtattttaaggtttctaggttgtccgtgctcatttccaagccaatgccataaatgagaccttgacatttgcaaggctcaacacaaagcttttttatgtcaaagtgacacatttgcttacaatgtattagttttactttcccaagcaagtatgaatcggggcaaaacaacattcctttgaatttctttagaagcatccaggtgtcccttaatgtgtcccagcagggcagtatcagtcaggacctacatgtggtgaggtgtttttgacccatgggggaattgcatggggcctgaggctctaaccatcaatgtggagccagagtctgcagggtgtagttgaaaaaggagaggcagttgcaggtgtgtctgagctggtgtctcacctccagagggaaagcagccagctgtaggccccacaattgggcagaggaatgaacgagtaaactgatacattccccgaactccagtgcagaagttggggagctaggaggaagccaccggcaaggatgcatgcctgccaatcttccaaaccataatgttgcccaccaactcaacagaaacttttaaccacttaaaactacttattcactgaggagagaacttatttactct

SEQ ID NO: 305 - protein, 1297 aa, Mus musculus
MATPRAPRWPPPSLLLLLLLPLLLLPPAAPGRSLPSPAHRTLLPVAGPLSPPGAGHTAPGPGVATRRGRSGRVPRGVSAALESLPESPSSSRSQRRITPSQTESGTSLGFLERTRELPEEGTVHTQVAGTWVSRQASHPALEPGEPTVLSQKRNSSGQEHSGPPFSWSQSHPPPSDHPSSSGSIKNGNNFTALQNPSVTQTKSMLITDTYTNGVPRTLRSLPVGVDPADETEGFPEHSRLGITSMSVRSSPSVKDSRTNSGLTEHLGDGEGTELSTENGYGLPSIHWQSDAPSFGGRQLASSSEAGDGRAMPLTEAVFRSDPSIGGGESTGRWILTKKKTSTDAAESSALHPEAGGAGGLTQSSHAAQQPRGGGEDSGMGGRSYAESSSSSSSTSSSESLDSSAPLREHSPPEDGAMLSDSSDLADSTSGARTPHTSAMSTRSGERTLRSLDLSSAAWARPTPRGNVTEHAGLLSGAPTLGVTGLSYTREHGSDAGQRTSSDHTDHGYVPSTFTKGERTLLSITDNTSYSEASESSTSSVKISDSPSQAQPKQSSMSSDDDEPAQSSTESPVLHTSNLPTYTSTVNMPNTLVLDTGTKPVEDPSDSRVPSTQPSPSQPQPFSSALPSTRSPGSTSETTTSSPSPSPISLLVSTLAPYSVSQTTFPHPSSTLVPHRPREPRVTSVQMSTAISAIALIPSNQTANPKNQSTPQQEKPITEAKSPSLVSPPTDSTKAVTVSLPPGAPWSPALTGFSTGPALPATSTSLAQMSPALTSAMPQTTHSPVTSPSTLSHVEALTSGAVVVHTTPKKPHLPTNPEILVPHTEGAITTEGNREHTDPTTQPIPLTTSTTSAGERTTELGRAEESSPSHFLTPSSPQTTDVSTAEMLTSRYITFAAQSTSQSPTALPPLTPVNSCTVNPCLHDGKCIVDLTGRGYRCVCPPAWQGENCSVDVNECLSSPCPPLAACNNTQGSFTCRCPVGYQLEKGICNLVRTFVTEFKLKKTFLNTTAENHSNTQELENEIAQTLNVCFSTLPGYIRTTAHVSREPSTVFISLKTTFASNVTLFDLADRIQKYVNSCRSSAEVCQLLGSQRRVFRAGSLCKRKSPECDKETSICTDLDGVCQCKSGYFQFNKMDHSCRACEDGYRLENETCMSCPFGLGQCGNPYQLITVVIAAAGGGLLLILGVIVTCCRKSKNDISKLIFKSGDFQMSPYTDVPKNPRSQEWGREAIEMHENGSTKNLLQMTDVYYSPTNVRNPELERNGPAYTGLPGSRHSCIFPGQYNPSFISDESRRRDYF

SEQ ID NO: 306 - DNA, 46567 bp, Homo sapiens
  misc_feature (1)...(46567): n = A,T,C or G
atctgccccactttctgtctcacaaacaaccttgccacagtcatcttctacccctgtcctgcccagggcaagggagactcctgtgacttcatttcagacatcaacaatgacatcattcatgacaatgctccatagtagtcaaactgcagaccttaagagccagagcaccccacaccaagagaaagtcattacagaatcaaagtcaccaagcctggtgtctctgcccacagagtccaccaaagctgtaacaacaaactctcctttgcctccatccttaacagagtcctccacagagcaaacccttccagccacaagcaccaacttagcacaaatgtctccaactttcacaactaccattctgaagacctctcagcctcttatgaccactcctggcaccctgtcaagcacagcatctctggtcactggccctatagccgtacagactacagctggaaaacagctctcgctgacccatcctgaaatactagttcctcaaatctcaacagaaggtggcatcagcacagaaaggaaccgagtgattgtggatgctaccactggattgatccctttgaccagtgtacccacatcagcaaaagaaatgaccacaaagcttggcgttacagcagagtacagcccagcttcacgttccctcggaacatctccttctccccaaaccacagttgtttccacggctgaagacttggctcccaaatctgccacctttgctgttcagagcagcacacagtcaccaacaacagtgtcctcttcagcctcaggtaaaacacagtcacacaagcacatgttaactgcaaggcccagtccagcactgagagctacatggggctcggggttcatgtgaatttgtagaaatggctggcatttgaaatagcttctgttttgcgacctaaaatgcttcctattgaaacacttaaagtgtaaaagaaggtcatgggtgggcctaattttctcacccctgtgttgtataatgcttcctgaataaagaggaaaggatgcattggccatgtgtcacattagtagatggtacaattgcagcttttagtgccctgtagttgtaagagcttttcaagcatgccgttaactcctcagaggtcagaggagggcagtgatgcaggattgtagggtggagaaactcaagtaaagaagcttaggaggcctggctgacacagggatcaactgggtatctgcgtctggatcagatcccagagtctctgagtcaggggctccccagtcaccagggagcttcttggcgtcactgggcttctcttgatccagggaagcccaagctcctttgtctccgaaagagtgtgtggctagttgataaatgggagtggggagacatgtaaatgaaaagatggtgaactaaccttttcccacagtgaccgcacggccagagctcctttacatcacacttagggttgtttttgtagccacgttgaagttgctggtaccaggaaagtaaagccagccaaatgatcctttgtcatttaaggaacggtagaaggaagtaggatgatgcagcttttcatgtcatgttcaaagttacacttctggcttgtccagacatgggaaaggaaaactgctgttggaggagtgaaatggaaactggcgtcttagggaagaaggaaagaagagatgatgctttgtagtggctggagcagaaagctcagggagcagcacagttccaacctgtcagccacaatcaacctgggctggaggctcataagcaaaccacccccatgccaagccccacagtgcccctttgtatcagtgatctgagcacctctgggaaatgaaaggtggctgtttctccagggaagtttgggagccttgcttcaaggcctatagccttcagtttcagaggccacatatattccagtgccagatgaaatctaattcacaagtctcccttaaagccattagccattctgatgataactgtaggcaagtattaggggcagattcactggctgttactatattttttgtgccagtgttcatgggttagtgtttggctatataagtgctgtgcttctatgggtgattttagataacacttgacatggcaatacaggataggaacaccatctttaggtttagctcatttgttttcagggttactattttttttttttgagtgaagacttgacttttaccttctttttttcattccaccactgatttcctttttgcagacaatgcagttatgttgtaggcttcggcttctctaagtatgtcagaaacctgtatgaagcatattacatagctgctcaactctgatcattttctaaatatggcacaatatgtggaggctgagttacatttggagattttggagtaaaggatactatgattttgataaagaaagcccaagagaaagggcagggcacgtgtgcacagacacacagacacacgtatacagagtaaatcttctagcgggggaatgagttgatcagagatccttttcccccctaaagtgtgctttcaattggcattgattcaagtagaattttcttaagtgtcacaaaggcaatataatcatcaatcctgaatggagtgacctgtaagcagcatttgattacaatcagttcttgcattcagggatcccattgtctgacacttagatctggacacaagctagtaccaggacccagtcccaatgcacctctgggaaacccattttacttttgtaatgtggcctttcagggcaagtaaacagaaataagcaagaatcaaatattagctgggagaattaaatatttacctaaagctgcctttacatttcctgtgtggttaactgctttactcctggaatgtgtttgtagtcaacagctgtgctgtgaacccttgtcttcacaatggcgaatgcgtcgcagacaacaccagccgtggctaccactgcaggtgcccgccttcctggcaaggggatgattgcagtgtgggtaagagaaaaagtaacgcccagtggtctgcaccacagtaccacgttgggctacccaataaactcctttttcctccaaaatgtggacaaatacactgttttagttaataccctgcttacttgagagtcagcatgtttgtaggttgtgatctgcaggagaatgtcaggaactgtagtgtggcactgccagacttcctgatctgtgtctgttcccaacactcctgccacactgtaccctattcctgcccctggactttactgtgctgatgcctcaggctggaatccccccactgccaccctaatctattgattaaagtccttccagttgtagtccagatgttatgtgaaacagtctttaattctcccctccattaaaatttgctgtttcccccgtatatgcaaatcttgtcttgtatttacagttagttgtttatgtggccacctccaccctcaatagatggcaagccccttgagggcaagagtgttctcatacttatcctttggggtctcaccacacctagcaccatttggcccttagtaagtacttactacactgggttatggttttgctgtttgctacagatgcaagatgttcttctttttctcctctacagatgtgaatgagtgcctgtcgaacccctgcnnnnnnnnnnnnnnnnnnnnnnnnnnnnnnnnnnnnnnnnnnnnnnnnnnnnnnnnnnnnnnnnnnnnnnnnnnnnnnnnnnnnnnnnnnnnnnnnnnnnnnnnnnnnnnnnnnnnnnnnnnnnnnnnnnnnnnnnnnnnnnnnnnnnnnnnnnnnnnnnnnnnnnnnnnnnnnnnnnnnnnnnnnnnnnnnnnnnnnnnnnnnnnnnnnnnnnnnnnnnnnnnnnnnnnnnnnnnnnnnnnnnnnnnnnnnnnnnnnnnnnnnnnnnnnnnnnnnnnnnnnnnnnnnnnnnnnnnnnnnnnnnnnnnnnnnnnnnnnnnnnnnnnnnnnnnnnnnnnnnnnnnnnnnnnnnnnnnnnnnnnnnnnnnnnnnnnnnnnnnnnnnnnnnnnnnnnnnnnnnnnnnnnnnnnnnnnnnnnnnnnnnnnnnnnnnnnnnnnnnnnnnnnnnnnnnnnnnnnnnnnnnnnnnnnnnnnnnnnnnnnnnnnnnnnnnnnnnnnnnnnnnnnnnnnnnnnnnnnnnnnnnnnnnnnnnnnnnnnnnnnnnnnnnnnnnnnnnnnnnnnnnnnnnnnnnnnnnnnnnnnnnnnnnnnnnnnnnnnnnnnnnnnnnnnnnnnnnnnnnnnnnnnnnnnnnnnnnnnnnnnnnnnnnnnnnnnnnnnnnnnnnnnnnnnnnnnnnnnnnnnnnnnnnnnnnnnnnnnnnnnnnnnnnnnnnnnnnnnnnnnnnnnnnnnnnnnnnnnnnnnnnnnnnnnnnnnnnnnnnnnnnnnnnnnnnnnnnnnnnnnnnnnnnnnnnnnnnnnnnnnnnnnnnnnnnnnnnnnnnnnnnnnnnnnnnnnnnnnnnnnnnnnnnnnnnnnnnnnnnnnnnnnnnnnnnnnnnnnnnnnnnnnnnnnnnnnnnnnnnnnnnnnnnnnnnnnnnnnnnnnnnnnnnnnnnnnnnnnnnnnnnnnnnnnnnnnnnnnnnnnnnnnnnnnnnnnnnnnnnnnnnnnnnnnnnnnnnnnnnnnnnnnnnnnnnnnnnnnnnnnnnnnnnnnnnnnnnnnnnnnnnnnnnnnnnnnnnnnnnnnnnnnnnnnnnnnnnnnnnnnnnnnnnnnnnnnnnnnnnnnnnnnnnnnnnnnnnnnnnnnnnnnnnnnnnnnnnnnnnnnnnnnnnnnnnnnnnnnnnnnnnnnnnnnnnnnnnnnnnnnnnnnnnnnnnnnnnnnnnnnnnnnnnnnnnnnnnnnnnnnnnnnnnnnnnnnnnnnnnnnnnnnnnnnnnnnnnnnnnnnnnnnnnnnnnnnnnnnnnnnnnnnnnnnnnnnnnnnnnnnnnnnnnnnnnnnnnnnnnnnnnnnnnnnnnnnnnnnnnnnnnnnnnnnnnnnnnnnnnnnnnnnnnnnnnnnnnnnnnnnnnnnnnnnnnnnnnnnnnnnnnnnnnnnnnnnnnnnnnnnnnnnnnnnnnnnnnnnnnnnnnnnnnnnnnnnnnnnnnnnnnnnnnnnnnnnnnnnnnnnnnnnnnnnnnnnnnnnnnnnnnnnnnnnnnnnnnnnnnnnnnnnnnnnnnnnnnnnnnnnnnnnnnnnnnnnnnnnnnnnnnnnnnnnnnnnnnnnnnnnnnnnnnnnnnnnnnnnnnnnnnnnnnnnnnnnnnnnnnnnnnnnnnnnnnnnnnnnnnnnnnnnnnnnnnnnnnnnnnnnnnnnnnnnnnnnnnnnnnnnnnnnnnnnnnnnnnnnnnnnnnnnnnnnnnnnnnnnnnnnnnnnnnnnnnnnnnnnnnnnnnnnnnnnnnnnnnnnnnnnnnnnnnnnnnnnnnnnnnnnnnnnnnnnnnnnnnnnnnnnnnnnnnnnnnnnnnnnnnnnnnnnnnnnnnnnnnnnnnnnnnnnnnnnnnnnnnnnnnnnnnnnnnnnnnnnnnnnnnnnnnnnnnnnnnnnnnnnnnnnnnnnnnnnnnnnnnnnnnnnnnnnnnnnnnnnnnnnnnnnnnnnnnnnnnnnnnnnnnnnnnnnnnnnnnnnnnnnnnnnnnnnnnnnnnnnnnnnnnnnnnnnnnnnnnnnnnnnnnnnnnnnnnnnnnnnnnnnnnnnnnnnnnnnnnnnnnnnnnnnnnnnnnnnnnnnnnnnnnnnnnnnnnnnnnnnnnnnnnnnnnnnnnnnnnnnnnnnnnnnnnnnnnnnnnnnnnnnnnnnnnnnnnnnnnnnnnnnnnnnnnnnnnnnnnnnnnnnnnnnnnnnnnnnnnnnnnnnnnnnnnnnnnnnnnnnnnnnnnnnnnnnnnnnnnnnnnnnnnnnnnnnnnnnnnnnnnnnnnnnnnnnnnnnnnnnnnnnnnnnnnnnnnnnnnnnnnnnnnnnnnnnnnnnnnnnnnnnnnnnnnnnnnnnnnnnnnnnnnnnnnnnnnnnnnnnnnnnnnnnnnnnnnnnnnnnnnnnnnnnnnnnnnnnnnnnnnnnnnnnnnnnnnnnnnnnntcgcccaggctggagtgcagtggcgggatctcggctcactgcaagctccgcctcccgggttcacgccattctcctgcctcagcctcccaagtagctgggactacaggcgcccgccactacgcccggctaattttttgtatttttagtagagacggggtttcaccgttttagccgggatggtctcgatctcctgacctcgtgatccgcccgcctcggcctcccaaagtgctgggattacaggcgtgagccaccgcgcccggcctgcgatgtgaatttctatacagagagtctgggtatcagcctagacacgtgagatgagaaagtgaagaagcaggaccattgttctggaagcctgcgtgcagagggttccacaggtagcacagctcaggaggagagcagcactatcgccttcacaatcatctttcccttttcaagtcatttagcttcattgttcataaacatcagaggaacatgcaaattagagcatgctgaaatgctttcatttggccaagaatgttttcagagagctccctgctgctcagaaagagtcctaagcagctggcttcactgaactgtagaacaagcaaaaagatgttaagtaaggattaagcgctttagacagtaagtgtaagatgttaaatgttttccctggctcatttgtgggtctttttctcaattcggcatgcaggctttcggggaaagagcagcttcatggacttctgtgtcttgagttatttgttttccatccggagggaaagataagcatttaatataaaggaagataagagccagcaataaaacacaccatactaaattttggttgcctgcccatttgtaagtcccgttcccctcaggctcaatcagcacaaattgatgttaactggaattttattttatgagtgaaatgggccttgaaaatgaggctgctttttttcatttccgaacccaacagtgtcttgaatatgggctgttttcattatgtggcttataatcatggagtcggcagccccatggagtatagccccacgacacatgcttggcacctttctttctctcaagtcccttgggtgtccttaggatatcagattcctcagggcacagaggttataggggaaaggagagctttgaagatggacacgcatacgctccaatgccagtggtggcccttgggagcctgggtgagctttcttaggaagttgcctgacctctggaagccccctttatcaatgataaaatgggaatttcctctgaccaagaggaatggggtttggatgggtgtggctctaaggacaagaggaaactgaagcacccccttgaagtggtgggcatgactcagttggagacctcagaggacgagagctttcctctgtcgaaagcctgatgaggcctgaggagcatttttagtgtctaacacatctccctccctcctcctaggatgacattgtttagacctgttcatctttcttctttgtagcagctttcttgggcatctattgtgcgggaggccatcctagggacattgctaaggctcctcctcttagcagccttgcacatacaaaaaaggctctttggagtttctctctctctcaaaagtttgctcaatataagccttcagcacagtccagtagatgctcactttgctagagaaaaatctagaagagggagagggagtcttcacccataaggagaaagaaatgcagagattgtcctgtgaggtggagtaaagccggacaccccagagatgtgcaaacacacacgccttgcataggttcttctgttgtgtaatttaacaagttacattttcattttnnnnnnnnnnnnnnnnnnnnnnnnnnnnnnnnnnnnnnnnnnnnnnnnnnnnnnnnnnnnnnnnnnnnnnnnnnnnnnnnnnnnnnnnnnnnnnnnnnnnnnnnnnnnnnnnnnnnnnnnnnnnnnnnnnnnnnnnnnnnnnnnnnnnnnnnnnnnnnnnnnnnnnnnnnnnnnnnnnnnnnnnnnnnnnnnnnnnnnnnnnnnnnnnnnnnnnnnnnnnnnnnnnnnnnnnnnnnnnnnnnnnnnnnnnnnnnnnnnnnnnnnnnnnnnnnnnnnnnnnnnnnnnnnnnnnnnnnnnnnnnnnnnnnnnnnnnnnnnnnnnnnnnnnnnnnnnnnnnnnnnnnnnnnnnnnnnnnnnnnnnnnnnnnnnnnnnnnnnnnnnnnnnnnnnnnnnnnnnnnnnnnnnnnnnnnnnnnnnnnnnnnnnnnnnnnnnnnnnnnnnnnnnnnnnnnnnnnnnnnnnnnnnnnnnnnnnnnnnnnnnnnnnnnnnnnnnnnnnnnnnnnnnnnnnnnnnnnnnnnnnnnnnnnnnnnnnnnnnnnnnnnnnnnnnnnnnnnnnnnnnnnnnnnnnnnnnnnnnnnnnnnnnnnnnnnnnnnnnnnnnnnnnnnnnnnnnnnnnnnnnnnnnnnnacattttcattttcgttagaaccttcgtgacagagtttaaattaaagagaacttttcttaatacaactgtggaaaaacattcagacctacaagaagttgaaaatgagatcaccaaaacggtaagtgtcctgaatggcatctttctactcgtcttttgtttcctagaacagattttattccaagaggggactgcctagcggtcagctgtgtctcctgggctcttcacttttgttatatttggaagggaaacttcttggttaaagaaaaagcctttcagaaatggaagtgaggtatttgtgcccagtagaagagtttcttcaaatgtgtcctcatgcacagtctttatctgcacctttgtgtttcttttccatgtgcaaactcatagttacagacatgctgatgacaggcatcagcaggagctgttggtgaggaggaaagacccagaaaaatcttacggtcccatctgctgttaacaggctgtgtgactttcctcttgtattttggaacttagggaaatgatactctttttcctcaaaggaatgccaaaggtgcagcagttaatcctgatgtcctagggtttgagaactcactgtatagatgaccgaggggtctttgattctgcttctttccctctttgcccgctttttatcagaatttttttttttttaaagaaaaatgccatcctgggcagcatggcaagaccctgtctctacaaaaaagacaaaagttagctagggttggtggcgtgcacgtgtggtcccagctactcaggaggctgaggtgggaagattacatgagccccagaggttgaggctgtggtgagccgtgatcgaacaactgcactccagcctgggtgacagagtgagaccctgtctcaaaaacaaaagaaaccccccaaaacagaaacaactaaaaaggaaaatggagaggaagaaagaagacaggaaaatgaagctcatataataaactttgcttctcaactgctatctgagtcagagatttgactcatctatacagtgagttcttaaactctaggttcagaaaattgaaatttgccattaaaaaactttagagatgaattgatttccaatctcaatgttacttgttctttgtggataagagttagtatattagctaggaattatacatttctacaggactttggactttatctgtgtaaaatacggatctagttctatttctctatctcctgagcattcacttcatgatagggacgatgtcagatggcgcactcctgtaacaggcattgccagcacatctgcagatagaaccccgggaggtctggaagtgaatgacattgcctgagtccacgcagagcaggtgcaaagttggggaacagtccactaaaccaccatcactactgataccaatttcaagttcaggcatccccaagatcgccctcagtttcaataattcactagaggagtcacagagcttactaaaagcgattatattaacagctacggtttattacagtgaaagtcaacagcttaaaatcagccaaggaaagagatgcacggggcagagagtccgggagagttccaaaggcagagcttccagctgtcctcccgctgaggagtcatgcacagtgttaactcctcctggcaacagtgtgtccagtatgcagggagtactgccaaccacggaagctctccagagccttgactggggctttgtcatgtggctgacctcaatctccagcccctctagaggttgagctgataccatgttacccaaccccaccataaatcacattgttggactctctggcatggcccagcacccccaggtaaacaaagaagtttttattagacagcacattccaagggcttagagatggcctcccaggatccaagagcaaaggcctgacttccctggggccaaggttaaattctttactacacagcagaattttatgtctactaatcctatacttgtcccttcgccacagctgcctgttggtcgtgctgcaggtggatatctcctgctaagataatacagggatttagaaccctttgcagaagtgcagtcctttgcattacgtggcgctcagtgacttatttgacttgctattttttgcccagtatcaatgtataatttactggtgatgtaacatacctgtccccaagaaagagtgaagattaatccatcattggctgaggaagccactcaaatgttctttcccgaggtgttctgtttaccaaacctggaaaaacaggttaataataaaacaacaataataaatcattgctattaggctatacactgatgtcatagaaagggtttgataatgtcccatgtttgcctccatcttctgcagagtggcatgtatctgatacatgggccttgaacacaggtggatctgcactgggcccagtactgagaccctccactccgggaaaggagtctcgatagctcctattgtgcagggtagcagggaagcaggcctgatatttcatgctgtagagggattttctgccgtctccaagggcacaaggcaaacatagggagagtagctcttaatttgctctcaacaaaggggctcttgacccacataatgtaatttctcacggagagcctttttgaagaagacctgtctttgagttaggtcaactcattgtagattatgaggcgtctatgtagggcctgtcagacctagagtagctgaaaggagcctttccagtgcagctcgttcactatgcagagtccaaataaacagttgcctctgagttgtttgaaaccctgggccttaaaagagagctgcttctttgaagatgttttgcatccaagggtgctattctgaacatcatttcctgccaagattttccccactgatttactctctgcctctttctctttgtactcatggaacaacagaaaggcatttaagaggggaacaaaaaaaggacaccacttctgtgcaaagccgcgtgctgataacttgatggctggaaaatgcctgttttatcctgaaaataggaaactggttctaggtccaaggcttttgtctaactcactgttaacgacaggcttgttcttcctttcagttaaatatgtgtttttcagcgttacctagttacatccgatctacagttcacgcctctaggtaagtaacagaattatatttgcttgtgaactagtctgtacaaaggggaggctgttctaacatgggtgatagcaacaaaaccgggctgttttcacccagccatggggcaatccagggccaaggtcactgaccttcatgctctcccatcccgtcactggtgaatggcgatgacattcatttccaaaagccttgggacccacgtgtcatttcagggctgttaaaaacccacaaactttgcctatagggagtccaacgcggtggtgatctcactgcaaacaaccttttccctggcctccaatgtgacgctatttgacctggctgataggatgcagaaatgtgtcaactcctgcaagtcctctgctgaggtctgccagctcttgggatctcagaggcggatctttagaggtaagagggcagccctctgggaggatcctacccatatagttaggcacagacctaagatggaaatgcaaggcatccagggctcaggcccaggaaaggccctcacagagcctatttttggcatgggtgttaagtcaaagacctttgtgcacatgcatcttcttttatgtgtgcatgcatgtacaaacatgcacacacacacccagagtcctgtacacaagccttgaagacacctggtccttggcatgcagctccttctgtttattttatccagtgttgatgtgggagggggaggggcataggagctgatgtgacaaagcagaaatcactctttttccactgaaaagttcctgctctctttggggaaacagaatgtacatgcttgtcaatgacccaaaaaaaccttcatctggccagaggcagtggctcacacctgtaatcccagtactatgggaggctgaggtacccttaagcccaggagttcgaggctgcaatgagctatgattgcaccactgcaccccagcctgggccacagagtgagaccctgcctcaaaaaacagaataaacaaccaccaccaaaaccttcatcatgatacattattaggttaaaaaaaaaaaaagcatgtgcagtattacccatcctttgtgtttgtttgtttgcacattataaatgcacagaaacaaaaccagaagaatggaggccagaatgcccacagtggcgccataaacaattattttccttttctcattcttgctttgtctgttttgtcaaaagcttctatagtgcctctggtgtgaggcaaatgaagaaagggattggagacaagttcaaaagggaagttttggtcttagaggagaagtttcacctccaggacaggaaaactcaactggaatctaaagtacttctttgcaaagggggcttgtccctgttgccacgtgctacatgatcaaagttagctcattttactacacaagtagggctggcaaaggatggagaatctagtctaaaccacccatctggcatccagacgctggacatgagtagaagatatcaggttgtaacagtctgctggtagatccatgacattgacattcccagtgggcctgggttccataacttccagtcaagagagctttctggagtgggcctgtatattacagagcttgggagccagattgttagcccttcattctgggataagagctggagcttggcccatttaaggctagttattaatctgagaaaaaaaaaaaaagctaaactttctgaagttgaagttactattgatgggggagtgaggtagaaaggtcatgccccattatatcatgctcgaaactttgagactctatggttttacttttttgtttctcttgacaaggattcaagggtaccaagttgtcctccccagtgaggtaggaaagtcacctttcagttcactaaatatttatggaatacattctatgtgatcaacattgcaccaggttactttttgtttcccataaatgcattcaaatcaagtgccttgcaaatcaagtgccagccatttggatttgaaagagcctgctcatggcagccctacccaccctctgactcccattcttccgactgcttgtatatggtttatgggaaagtacctctcacccttgctgccttgctgaagttcctatttacttctcctttcagagcccgtgagaacaaagacagctatgcatattagctgaaaaaaacaggcttgtttccctgtttttcctcccaggtcttctccaggttttgccaagaccagcctggtctcatgctaacctttctgagtactagagaggtggccttgacagcttctgacatctgggtgtttccagcataagggcagtgctgggctactctggacactgccattggaaaggagggttttctgtcttcacttcataaaatatccacttccttgcctttcaaagaactgcagctcttgtcatctccagaggtttagtctttggaaatcccccatggaatgtctcagctttagatttacttagagtctcattgtctgttttggcggatgttatgcccaggaaagaccatgggaattgtgaatgtagcaaaatcacattgccaggctttatatgaaaatgggattctacgtggtcctattggatgaatttatggtagaatattctttgagaatttgtagggtagcaactcctccactgcagaggcagggcctgtgtcccatgcttttgcatggatctgcttctgtgcagggcacagttgctccagcagagtgatttgccagcaggctggattaatgggcagggtggaaggaaaacgtgacattggcttccagaaaatatctaatcaggccaggcaactctggctggctgctggacaaggcaagtgtcagcctggacaggtttctgccctggaggaatttctttatattaaggcttgaggactggcaaagccttcaaagagttgagatgagggattgtggaagttcattacctccctggtgccagctttgcagtgtttgcctggtgagattttccatttttaatttttctcccttaaatacaaactttttacaataaacaaaggaaattctgtcacacacacaaatgtggttctgattgagcacgctagcttccactgataaaggcaggaaattcagctttgagaactagagttgtgtcctaagcttacctcgtgtgaccaggctgtctaccggtcctgagttctcaggactcacaaaagggggcagatttcaggaaccccatgtggggtggcagctcatgtcaccaaaacctgcctgggcaggggcagttttgcagcattaaaaggggtacctggcttctgaataggttggcttcctcctttgggtgggaaatgggagaccatgcctggaaaattggcagccattcctccctgcacaatagatacatggcccttccccttgcatctttcttcccattctgaacttgagcttgccccccaataacaacagcaaatatctagcttgccttgccctgcacatgggtgtaaataaggtactatccactatccagttggtttcctatttttgttctgttctctgtgtaccccatatacacaggaggcctatgcaccctcattgtgtctgctgtacacaacttcacagagggccatatgccccacaggaaatgctttctgataataatgaaatgattctttgtcatccatgagatgaataaggccctaaagtaaacaaggtagcaagcctgaaagatgggctccttctctgcctgcctctgtttctctctgcctggtcagtgacaggcggccatgtgtaccaaccagtccctgtgccaggcactgaagacccagagatgaagaagcctcaagaacccatcagtggagtgggggaaactgcctgataagcagaattacactacagcccggggcaagcagattgtctttcagatctctcctcatcaccagtctcttgtaggcagcacgctgtcaggacagcaagccaccttgccacagggagtggttctaggtccctttttaggccatgcagacacacagagctgagatgtacttccacttgaaacaggtctggcctgcactcctgttcttagtccaagtctcggcttcctaagaactcagccgtattttctggttgtgctgatccttcctccgcagtcctttggaagacacggggccattaagggctgtatttgcagtgagcaccagaggagtgaacagggcctgtttattccaatttcgtttctcagtgggtccgtggcacgctgtgagggtgttttcaacggggaacactggtgcacagcctgcggctgatcagagaaggagtggcagaaggcagtacagatggactcctgagaggagtgttgctctgtggagacttttcggaaaactgttctcagcctcttgaaatagagagttcatgcagacacatgagctttgaagtggaggagattttaaggtttgaagtggagaaggttttgttttgtttcactgtcttgtttttccattccagcgggcagcttgtgcaagcggaagagtcccgaatgtgacaaagacacctccatctgcactgacctggacggcgttgccctgtgccagtgcaagtcgggatactttcagttcaacaagatggaccactcctgccgaggtagccacagcttcgcctggggttctgtgcccagtcctgggactctgcctggtgctctgtttctctttcttgctctctctctgtctttgcttaggcgtgaccattctaaactgagggtaactggttcttgttattttgctcgtggcaggattgaatacattatctccttggaataatagcattatctttgactggtgcatgctggtctggccaattaaattcaaaggaagacagaatggaatgcctgtggtagcagtgccttttctttttttttccatttaaaggaagttagaaaaattattgttttaattcccaaagctttatctgttgtctgctaatcttttaaagtggaagtacaagcgtggggtcaggcttatatctttcagaggcagctgaggccagagtcagagcccgactctgcctcactgatcatgtatcaccttgggcaagtcactttgtttctctgagcctcggtttcctctcctgagaaatgggtatggtgatcctctattggatatttattctaagagttaaggaaggcagtggatatagaggccctttgtaagctgtcagcatctgctcttgtatttggtccaggttgttgttgaattaatgagttctggttttaaaggtctcatgaagtgcttgagagcagaaatctaattctactaacctttaaggtgaggcttaaattcatttagtttcagggaaaaactgctcaaagaatgtagtccaagaatactgctttaaaataaaattaattcaggtccaagagcaccacgcaccctgacttataaaaggctgctgcaacttgcaatcaccagaaaaactaacgatataaaggccatcatggatggccagttttcctactcagtcaacaccttgctggtgacagatgtcaatggatgttactggaatctgaataaaaatcacatactggggcgaggcgacatgccacttttctccatcaggacttcccatgagaggacttgttcatcacagataaaaatatatttcagggcagcactcttatcctgagcttcagaccctctgactttgttaggtttggatacaaagttcttctcaagtgcgcatcatcagctctccaggtgggacctgtgatgggttttgaaggggagggccaactctctgtgttgggcctaggtcctgatgtgtgactaggacacagcatgtctcagtgccgtgccagactgccacattgctacaaagagatgatgcttcctcatgccatcttatctgctttaatgcaaagtgttccttgcacctcttagaaatggggagttgagccgggcgtggtgactcacgcctataatttcagcactttgggaggccgaggcgggcagatcacctgagatcgggagttggagaccagcctgaccaacacagagaaaccccgtctctactaaaaatacaaaattagctgggtgtgatgacgcatgcctgtaatcccagctactcgggaagctgaggcaggagaatcgcttgaacccggggagtggaggttgcagtgagccgaaatcacaccattgcaccactgcagcctgggcaacatctgtctcaaaaaaaaaaaagaaaacaaatgaggagttgagcccatcttcacatgggaaggggactgggctaacatccatgtgtgttggggcgctgtgctgctgacaggggatgacacaaggtgggcagaggtatgggcatggtgctgtggtgttccctgtgaacagtgtctcaacaatggccctatcacctttgcttctggctggcctgcgccacttcctctgtttccaagtcagcaattttgtaattgtttcagttacaggctagcattaacaatagctgtgaaagatttaccgagtgtgctgacacaggcaccagcaaccttatgttgaccaagtgaggacccaagaagcagcataaggaaaccttgattcacttttgggcttgttgctgagaccccgtgaagccctttctcagcagtatttgcaccatcaggcctctgaggagtggattccgggcttcttgggccacagccctttaggctgggttctgatgggttagcagtgacatcttctggccatcagtgctggagcactgacacctcaaatcaaggctcaatataaatagaggatagaggagtgtgtgttttctaaatcactgcagttcaagctatacattagcaagtctctatgttctctgcagcgtgtgcgtgcacacacacacatgcacacacaacgtgcttggtgtctcacagaaaatgtctttgccagactttcaaagctacacataaaatcaaagtagatatccctctcataggtttcttagcttccttccatcatgcaggcatcatgattaattcttttttttttttctttttagagacaaagccttgctctgtcactcaggctggagtgcagtggcgcaatcaagtctcactgcagccttgacctcctgggctcaagtgatcctcccacctcagcctcccaagtagctgggactacaggtccttgccactatgtccagctaatttttgtattctttgtagagatgggcttttgccatgttgccgagtctggtctcaaacactaggctcaagcaatccacccattcggcctcccaaagtgctaggattacaggcatgagccaccacacctggcaatnnnnnnnnnnnnnnnnnnnnnnnnnnnnnnnnnnnnnnnnnnnnnnnnnnnnnnnnnnnnnnnnnnnnnnnnnnnnnnnnnnnnnnnnnnnnnnnnnnnnnnnnnnnnnnnnnnnnnnnnnnnnnnnnnnnnnnnnnnnnnnnnnnnnnnnnnnnnnnnnnnnnnnnnnnnnnnnnnnnnnnnnnnnnggcaatgaattctcacaacctgtttgcatgtctctttctttaatccgactgccattcccttgagtgctagaaccatgtcctgagcagtgcagggttcagcaaatgtctgttgaatgaacgagtggatgataaggcagcaaataagatgggaaaagattgacatggctagatataatttcctgcaagggaacaaaagagtttttaagatgccactgtcagctgggcacagtggctcacgcctataatcccagcactttgggaggctgaggcgggaggatcatgaggtcaggagttcgaggccagcctggccaatatggtgaaaccctgtctgtactaaaaatacaaaaattagctgggcgtggtggtgcatgcctgtagtcccagctactcaggaggctgaggcagaagaatcgcttgaacccaggaggcggaggttgcagtgagctgagatcccgccactgcactccagcctgggtgacagagcaagactccgtctccaaaaaaaaaaaaaaagatgccaccatctacttatttctatttttaagtccagaagacttgaattcacttgtgtcttatggcaataggggaagcccagtttgggaatatatactagctgttgccaaattcatttcatcttcagtgctctgtggtcagaatacctctggggcaggggtccccaaccctaccagtttgtggtctgttaggaaccgggctgcacagcaggaggtgcagttaggaactgggctgcacagctgagttccgcctcctgtcacatcagcggcagcattagattctcataggagtgtggaccctgttgtgaactgcacatgtgagggatctaggttacgtggtccttaggagaatctaatgcctgatgatctgaggtggaacagcttcattccgagaccatcttcccaagaccacccccttgctggtccatggaaaaaatgtcttccatgaaaccagtcactggtgccaaaaacgtggggactgctgctctagggtgagtgagatgagaagctgggtcctaaggagcacaggagcacctcactgacaaggtttccccagaacagcgccacggcacagtagcactcaaccactgatgcgtaacggaatgagcccatttgaaatagagaaatatcatgacatcagggagccaggtcacttctgatacaaaatgaaaacagcccaacccatcagctcgcgggcaggacaacagatggaccttacatctgcctggatgacagccatggagtggagcacttccacccagcagatgaagtctaatgttgggtggggagattggatgtaaaaacatttccaggaagaagtgttcaaaatagaaaaggctggtgtgacatcagcctgcctcagtgccgagatgggtggggaggagtcactgaagaagcaagcaatttccggtggctgccccgcagcgttagccatccatggatcatccagggtagcttcccccactcccacgtcctgctgcagtatgaagcagaggcatacacaggaggagggccaccagacatgggagaggcaggagcactcagctgcctccttagagaaggccccacctgagtgaggccagcagagaactcaggtatcaaagattgggagatggggcctcgttactccttccctaaacaggatgcaattatgctctacctgtggcataaagtgaaagcacctagtgaaaactgatttgataatataagatttaaaaatatgtaaaaggtaaatcaggttaaaggggaaattaacggactgttttgttgaggccagaaggaaagtgaatatgcagaatgagacacagcagggtcctgcacgcttgctaaaagaaggcccctcacttaagtgctgaggttcccggacactgaggcaaaaagggaaacatgactttgaaaagagtcagggtccctaaaataaagagcagctgttcaggagcatccctgtgttttaaaacaatggggccaagagcaatttctctggggcatcctcgtcaagaggttactgagtggtattgtagcaaagcagtccatgacatccccaaataaataccacagggactttcccatggctgccgcttataacaaaaagcccttaatacaagagaatgtagctcaggaaaagtgatactgtggggtcaaaacagtgctgtccaggtgcacagctctctaatatctgctgtgagacacattacagatgatttagaacagtgtttttgaaactgtattccacaacactctagtgatatgttaatagaaagtctgtaacaataaagcacatgccagaggcattcagctgctaacattaagaaagtaggaggaagaagattcaacacatcgtcatgaggaaagttatcacacacaaggacgctggacccagcccacagggcatcactcgccagccccctgcccctcctcacccccagccatgcatgctactggcccccataacccaccattagcacgtctgccatcccatcaagtattgcagctctacactctgtaccttttcttattcgggatcttttatgcaatgtatctcgtacattaaccctgtatcacatttttatcattccttgcagcagagaatttgtctgtgaggccatttttcattgctttcattcaagcatgcattatagctcatggtgttctgtcatcttattgttgtgttgaaaatgttctgtgatcacataaattcaggaactgctgatccagggaaatggccaggctgcaactgcttcagtgaagtagcgttccatgagctgcaccacccgagggttcaaagttctgttcttgggcaaggtgccgattagcacacatctagatatgtccgaaatcccctacacagactctagggtgagcattctgttacgaaaacctgggtacacaccaggactgtgccccagaagatgtcacctacagctcccccccttctcatggaagggtgtcagcagggccattatcaggttaaaggtttgatttacattaaagaaggggagccatatgtctttgtgatggaaggagtttccccaggggacattcttcatctatagagaacttctaaatgaattgcattggtcatataataattacaactacatgcctgacatggtggttcacgcctttaatcctagtactttgggaggccgaggagggcggatcatctgaggtcaggagtttgagcagcctggccaacatggtgaaacctcatctctactaaaaatacaaaaattagccaggctttgtggcgggcccctgtaatcccagctacttgggaggctgaggccggagaatcgtttgaacctgggaggtcgaggttgcagtgagccaagatagtgccactgcactctagcctgggcaacaaagctactcatctcaaaaagtaataataattacaactacaaaaccctgatttagtggttactatgtaccagacctgtactaagccattggattgccttatttcacttaatcacctccaataaaatactttttatagctgggagattgagagccacaaagaggttaagaaaagttttttgataaggttaagatttgaggctaggcatggcgaatcatgcctgtaatcccagcactttgggaggcagaggcgggcagatcactttgaactcaggagttcgagacaagcctgagcaacagggtgaaaccccatctctactaaaaatataaaaatttgctgggcatggtggcacatgcctgtaatcccagctacttgggaggctgaggctggagaatcacttgaacccaggaggtggaggttgcagtgagccaagatggcaccactgcactccagcctgggtgacagagcgagactctatctcagaaaaaaaaaaaaaaagagttgtgccggcaacagtatttaagtgaggatcattccaaagcagtttgcagccttctggtactagaataatcttgtggactttagggtggctggcgtttaattaactgggagtttgggagaggtaaatagacacactcatgcattttccttttgtctttcagcatgtgaagatggatataggcttgaaaatgaaacctgcatgaggtaggctccatgttgatttagtctaattttgttacaaatcttatttagataaattgcctcacttatttcttttgagattggaaactaattcttgcccttttttctttcttggcttgcagttgcccatttggccttggtggtctcaactgtggaaaccgtaagtgtacaaaagtggaccattatgcgtgggcaggggcctggccctgttgttagtgcacaggtgtcagtctcctcccacttccctcagttcacacctgctgtcttcttaggttctatgccaatggcatgggggaaacaaagagaaaggccagacgtggtggctcacgcctgtaatcccagcactttggaagatggaggcaggaggatcacttgaggccaggagttagagaccattctggccaacatggtgaaagcccgtctctagtaaaaatacaaaaattagctgggtgtgatggcacatgcctgtaatcctagctacttgggaagctgaggtgagagaatcgcttgaacctgggaggcggaggttgcagtgagccaagatcacgccactgcacttcagcctgggttacagagcgacacttcgttttaaaaaaaaaaaaaaacccaaaaaacaacaacaaaaaaaacaaagagaaagacttgactggtactgttcaggggctcaaggtctgggctgggcagggagagaaacactcactcctaaatacccctgctgtgtgctgagtgttactgtgataaccagacatggggtgtgggacggggaggcagggactgtgcccacagaagaatgagaggacactcgacagtacttcttggagggagtggaattagaggaacagtaggaaagatttagactggcgggtatggggggaggacatcccaggcagagggagcaacttagacaaaggtcttcaggcagccatgggcccttggtgttctggggacagtgtgtaagtggatgtggctggaagataggaagatcggaaggcagaaagtagaggatttggattggcaaagtatatgaggtctgaactgttggggttgggatcaccaggctgaggagtgtagactctaatcaataactgtcaggcagctggcaaaagtcttagagcaggaaagcagtttgatcaaggaaagcaatttgggctgcattgagaacagactggacagaggagaatgtgggtgcagcttagatatttccagcatagtcccaccaggcatgctagagacacacttaggagtcctctctgctccaggtggaagtagagggtggaacgccaagcagccaagagtgttggtggggactgtgagcggggcgtgttttgcacctaatccagttcttggagaaaaccagttgtgattcatttaagattgcttgcactgacattttcttatattcatacattagaaattgaaattatctgcaaaattaaatttggggatatagcatatcataggatgtaatagaaatactaacaatgaagattttagtttaggacagctttggctctcatcctacagacaaatgtgccagtggactattttataagtttactagaaggaaagtagacatgattttatttaatgtgtgtaaaaaagcccccagtttctattccccagtggtataccttacatctgatttcttcagtggtgttttctttgttcgtaaaggttttctattagcaagtttcattattgactttctttgagcataactaaaaaataaaaataatgaaataaaaatcaaacacattcaatgctgaatataaaactgacataaaactctcttggtgcacccagcatggtgctactctcaggtcagagtctagagacttggaattacatatccatttaggattactgatgactttggtcatctgatttatcttgactgcagactagcaagaggttacagaagatagcctcagagaaagactagggaggcaattctaaaagcaattatatttatagtcatatgagtagagagggagggactcacagaattgatatttgtttttctgtgtttttgagatggagtcttgttctgtcgccaggctggagttcagtggcacgatctcggctcactgcaacctccgcctcctgggttcaagcgattttcttgcctcagtctcccaagtagctgggacaacaggtgtgcaccaccacacctagctaatttttgtatttttagtagagacggggttttaccatgttggccaggatggtcccgatctcttgaccttgtaatccgcccacctcggcctcccaaagtgctgggattccaggcgtgagccaccgtgcccggccgatgtttgttttttaagtagcaacctgcagccctgagtggtgtagtaaacaaccctgtactctttagaagtcccagaggacactgtggggccatagaaccatgtgagcacggcccttcactccaatggaccccagtcatcacgctctaaatggtgtttggtgcactcagtttaataaggcaaggaagttatcatattttaggcttttttatttaataaattaaagaatagtcaaaattctttttaggtgtcaatgctgaacagggtaggcttgagtattttggagatttggcttatgtaaaacagtctggatggcagtacatgtcctttctaaagatcagtatttaggcaagccagtttctcagctgggctcagggtctttatgcttttgtgtttaggaggatatctatgccttaaaggggctgcctggtctacagagtggtgtgtgttcactttttcgtgtgaatctcatttctcacttgaaaccagaacagagtcacagagagctcgtaaactgatcagagaatggagtagcctgtgcacaaaaatagataagaaaatctataacgtttcaatgtggaaaaaggaggctgaataatcagacagaaatttaagatatttgagtcttgtttcccaaatgctggaatactagaactacatggtatatatatatatatatatatatgtgtgtgtgtgtgtgtgtgtgtgtgtacacatatatagtctttcagaagagatgcttcaaggctaagagtagaggttacatcacaagcctgcggacctgatcctaagatattgttagaaacagagaggcttggccgggcgctgtggctcacgcctgtaatctcagcactttgggaggccgaggcgggcggatcacgaggtcaggagattgagaccgtcctggctaacacggtgaaaccctgtctctactaaaaatacaaaaaattagctgggcatggtggcgagcgcctgtagttccagctactcaggaggctgaggcagaatggcgtgaacctgggggggcggagcttgcagtgagccgggatagcgccattgcactctggcccgggcgacacagcgagactccgtctcaaaaaaaaaaaaaaaaagaaaaaaagaaacagagaggcttagcagcaggaggctcaaagtgcagcagacctgtatcacgtgtgcaagaaactcatctgaatgcaatcccacctgatggcagagaaagagagagccagtgagacaggtgagaggtgtggaggtgtggccaccctgttcacgtgtgcccctcgggtgagccagggagcaggaggtaagagatatgacctgctcagtcctcttggggcctctcatccctgacaggcctctcatagaatgagctagtactttaaacctgctttggtcagacagctccctagtttttattttttatttttagagatgaggtctctctctattgcccaggctggagtgcagtggcctgatcatggctcactgtagcctcaacctctcaggctcaagcaatcctcccacgttggtctcccaaagtgttaggattacaggcatgagctaccacacctgacccctaaataagttttattagaaaatgcttcatgtttctcagcgaatggaagagtgatccatctagggaacatgagtctataaagggctgcaggaaaggggtgtgagctgcagggcattattctaagtggcactggtaatttttttctcagagattattaagtactatacatgtttggggatgctgtttccctatgtcattgactattctgtaagttcttatgttaggaaaaagtcaagtcctctccattatttttgtggggttctggaagtagccaagatttctctctgattcctcagacttccttttccttcccatttgtccaagtcactgtcactgtgtccagcagagggcagaggcctgtctggatggtttgctcctggccaccttttagaaccggccgcctatctttagtttggtaacttttgttattctgtgatggcatgtaaatatcactttatcattttgatatctctattagtttcagtgttgcaagacagttaatattatagtggctgataataagtagcacttgccacctgcctctttctctgaggtctgggccaagacctgggtgttggttaaggagttgggaattcatccctctctatggtgatagcatattgggagtctgtgactcatcactcaacgttttgtgccaaatagcagggctctgactgcccaccgctattactcccattattgccacccaagacagcaggggccttcctggggctgtgactcaggctggatttttcgtaggcaagaaatgcttcttctctatgcaggctttttagggcacatgctctacccaagcccaatgaggctggggaggctggctttttccagccaagcacacatcatccaactccagtagattttggcattaggcataacctatgtcccacccctcaaaagtttctgtgcactttctacttgtgcccagatttcagtccttgctccttacagagaaactggaaagggcaaggcacagtggctcacgcctgtaatcccagcactttgggaggccgaggcaggagagtcacttgaggtcaggagttcgagaccagactggccaacctggtgaaacctcatctctactaaaaatacgaaaattagctgggcatggtggcacatgcctgtaatcccagctacgcgggaggctgaggcaggataatcgcttgaacctgggaggcagaggctacagtaagccgagatcgcactattgcactccagcctgggcgacagagcaagactgtctcaaaaaataaacgaataaatatctggaaagggcaggacaaacctttctctcaaatcttcaccccctgctggagcagggcccccactcctgggcagcgcaggcctgcacctttcttatcacagctctccttttaattttttaaacacgtaaaatatctctctgtttatatcccagattccaccaatttcaacagcaaatatcccatttgccagatggccccagaattcttttaggaatgtgtcatcagatgtgtctctcactccccttgcctccacccttttcttagggcgtgcacatttcctctgttgctggaagtttacgttggttcctcctcacagtttcataattgctaaacaactttgggttgtttagccttttttctatttttaaaataaattccttttttaaaaaataacaatatagcacatgcccattaatttcccctattttaacccaaattaattagaaaataaatagaagttaagggaagaggagagtaaacagtctcaccacccattaaacactatgttcaccatgtttccttactactaagtgtggggcataggccagcaggatccatgtcaccttggagcttattggaaatgagcaacttcgggctccccactccagacccactgaatccgaatctgaattctcaccaggcccataaatttagttaatatgcagatttatatgcatattaaagttagagaaacactggtattatatatttttccagagatatatatgtgtatgtctttttaacagaaattggatctcactgaacatactgttctgtaacctgcttttaaacctagtaaactgtggaatgttttcacttacgtaattttataatgttacgtttgatagtcctgtgaaattctgctctatggacctactgtaacttccttaaccattcccctcttactgcctttcaaaagtctctttttaaaatattcctgtcatctaagccattcttctgttttttgtttgtttttgttttgttttttggttgtttttttgttttttggttttttttgagacggagtttcactcttgttgcccaggctggagtgcagtagtgcgatcttggctcactgcaacctctgcctcccgggttcaagggattctcctacctcagcctcctgagtagctggaattacaggccccaccaccacacctgggtaactttttgtatttttagtagaggcaggttttcatcatgttggccaggctggtatcgaactcctgaactcaggtgatccacctgcctcagcctcccaaagcgctggggattacaggcatgagccaccgtgcctggccccatttttctgttttatggttattgtcattttgtgatcatagagctcacataattctcctagattacttttttctggccacagacatttttttccatccctctttcatatttgccacgtctcttttgtaggtcatcctttcattcaaagggtctgcacctcttcagaggagacccctgcctcacagcctcccagtgtagccagcagggagtgagagtctgccttccccactgacagccctcttcccgtgaagccagacattccgcttaaatatctttctacactgtcttcccagcccaacccacggtctgatggcaggtgtagaaggtgtctttcagttgtgttcacccagttgttgccttgggttataaaagacttagaccaatggaaatgctgtgtgttggtggaagtcactcagaacaaacatctgggaagacagcactaaactgcttaggaggaaggagggagaatctattaatattacccagaaggcagctggaagtctcattcagctaaaagcagtcattttactcggtcttgactggcctcccttcacttcaaacggggtaaggcagggattggggagagggaactgttgttctgtacccaacccttctgctagcgaggactatttggtgaggtggaagggatagagttgtgtaaaacatcaggagaaagtgacaatcatgtggggcactgtcacagtggagagtggtgggcaccgggtatgttcacaccctggttgtagacttgcaaaaggtgaatttcagaaggtgcgggagaaaataagaatgctgtgaacagagatggaggaggaatggaaagattttaaaggcaaaatttgtctgagtgcggtggctcacacctgtaatcccagcactttaggaggccgaggcgggaggattgcttgagcccagaaatttgagaccaacctgggcaacatagcgagacctcatctctaaaaaaaaaaaaaaaatcagccaggcatggtggcatgcacttagtgtcccagctgcttgggaaactgaggtgagaggatcacttgagctggggggtgaggttacagtgagatgtaatcatgccactacactgcagcctgggtgacagagcaagaccctgtctcaaaaaaaagattaaaaaataaaaggcaaaattctaaccataaatcacaagtgagctcagtgaggaaaaatatggagagaactgaatgcattgtaagataaaaactaatgtggctacctagaaaattctgtaatgtgttcaagaatcttaaaggaaggttggctaaggttctcctggagtaagtgagcccagctagcctaagcgacaaagagagtttattggaagaatcctggcatcaggagtggaaggaaccaaggaagtggaggaaggaagctcagcagctgggggtagcgaggagcttcctgtgagagcacatgttgccatgactgcatcctcatggctcatctccactctttgccatgtatctgtatgcaggctctccttcccagacaacatgatgggaaatagggtcaccaaacagctcttggttgggggtggggaggtctctagctcagcaattgtgaaagtgatggccctcttttcccaaattcctgggaagtaactaattgatccactttggatggtgggtttgttccaggaccagccagctgtgtccaggggatggtgttacatgtccgagtgtgcccacccccggctgcagatggaagggggtgcacagttttcagaaggggggtggctaagcagatagtccagtagatcccatccaaataagcatataaacataaacaaatatggctctggggaaaggctaaggcccagaatgtgctgttggtttgatgaaagatgctaactgtgatgacagcaatgtcaagctgtgaagaataagggaaacatggagccattgcttgagaaagactgaaatgtcaacaaatgccaagaagaaagtaggactaagaattccaagctcttcattccagaaatctttttgcactaaaaaggataggacaagcctaagatgacattcactgcctctgtctcacctaaatattcagagcacctctaaagctaggaaacacttcagttggcacttattcaaatccatgcacttctacgtcatcataaatctaaaatcagtacttaaccccaaaagatcagttgtagaatgattttaagaagatctctgggggatattacaaggttacagtgacatggctgccaaagaacttcaaatgtactctttaaaaaatatgtatatgactgggcgtagtggctcacgcctgtaatcccagcactttgggaggccgaggcaggcggatcatgaggtcaggagtttgagaccagcctggccaacatggtgaaactccatctctctaaaaatacaaaaattagctgagcatggtggttcattcctataatcccagctactcagctggctgaggaaggagaatcgcttgaacccgggaggcagaggttgcagtgagccaagatcgtgccactgcactccagcctgggcgactccgtctcaaaaagaaaaaaaaaaaatatgtatgtgtatatatacacaatgtcaagatttcagggaggggtgtgtgtgtgtgtgtgcatatgtaaatatgtaaataaaatttgggaaatacagaaaagcacaaagaagaaagcaaattatccaccattacccgaggcagtgctaacttgtgcaaacattttggtgagttcctcccaggctctttctctctgcttgagtgctgggtggtctcctggctttcagcccagtgctctttcctctcctgtgtaatctaaaccagtgctacccacggtctggtccattggctggcagcagcaccatcccgtagaagcctctagaagtgaggttctgagcccctgcccagtatgactgaaccaaatttcttggagcagggaccaggaatctgggttttaacaaggcttgtgggtgactgagacgcagacgggagtttgagaagccctcgtctatgccagtgctacacaacttgtggtctgccgtgtgaactgttactggaccatggcaagataacacagaagttgagagtgagcacttagaaatgtttatattaacttgacataactgtgacatccaagcatgggagccttggaaaagagttttattatatttcacaaatatatcagtccacagtcgagttgactgtgactttaaaaaaaaaaactttaaaaaaaaaaaaaaaggaaaaagtgaaatttatgatagttggtgcctgtggggacagatgaggggaggagcacatgcgactttattttctttatttaaaaagaatatccaggttgggcgcagtggctcacacctgtaatcccagcactttgggaggccagggtgagaggaccacttgaggccaggagttcaagaccagcctggacaacatagtgataccctgtccctacaaaaaccaaaacttagttgcgcccgtggtcccagctgcttggcaggctgaggcagaaggattgcttgagcccaggagttgaaggctgtagtgaactgtgattttgccactgcactccagtgtgggcaacatagtgagacctgtctcaaaaaaaaaaaaggatatccagaagcacaaacaagcaagcaaaaactggtcctcaggccaggcgctgtggctcacacctgtaatcccagcaccgtgggaggccgaggtgagcggatcactggaggccaagagtttgagaccagcctggccaacatagcgaaaccccgtctctactaaaaatgccaaaaaattagctgggcatggtggcgcgtgcctgtaatcacagctactcaggaggttgaggcatgagaatcgcttgaacctgggaggaagaggttgcagtgagccgagatcacaccattgcactccagcctgggcaatggagccagagtctgtaaaaataaaaaaaaaataaaaaaactggtccttgaccacagatagtttgagaagcactggtgtacaccatctgtgtctctttttagacaaaactgcttgtttccaacaggaacctgctacagctgcagccacttgcaagggtcacttctaaaatggatgcttacttgttttgttggaagtgagaaaatttaacttggtgtggcaggataagcaggagccagactctggtctttaggaaaaaagggagccacagagggttttttaaagcagggaaatggcaagatcagatttgctttctataatagtgagtggacaagactgggcacaggtggatgcgttgggaagcagctgcagttgtccagacaagggatgatggtagctcagagccatgttgggggagatgaagaaaagtggataaattcaagaggtttgttttctgtcttcacttttgttaaaaaagaaactttcaaatacatgtgttgggaggtaaggaagagaatgtgtttattctgtggcttggctttgtttcctgtgtatcttaatactgatggcttttgtatcctaatactgatggttttacgtaatagccaggtttctgtgctatttatttaaataaaaggataggaaaattgttgcatggcttgtatttgctcatagtctacctgttgcctgtcttcattctcaaccagcacctagtgctctagaagcttggtgaggaggggaggaaggtgtcagccctgtacctcatccttgtttacatccttgtttagtagaaacggggtttcaccgtgttagccaggatggtctcaatctcctgacctcgtgatctgcctgcctcggcctcccaaagtgctgggattacaggctccaatcttaatttactatcgagaatccggctactggtgtttcatcctggatcctacaactagagaacacaattttcttgtatttccacaaccaaaaaatcaataggaatatttaataaaatttattgaagatatgattttaccagaaatacatagatataaaagcaattaattaaagcttttaatattgctttctacatatgatatgtacttgcttaaatcactgctaatttctggtaattaaatttgatgtgtatctattgaggagctactcagtccctagcatggttgatgcagtgattcccagactctggacttaactgatcagtaatgttccttataaaattgcggagtctaacctagggttgcctcctttttattttatcaagtaaaaatctagaactgaatcaagaatttttaggccaggcatggtggctcaagcctgtaatcccagcactttgggaggccgaggctggtggaccacctgaggttaggagttcgagatcagtctggccaacattgcaaaacctcgtctctactaaaaacacaaaaaaattagcagggcatggtggcacgtgtctgtaatcccagctactcaggaggctgaggcagaagaatcgcttgaacccaggaggtggaggttcagtgagccgggatcgcaccattgcactccagactgggcaacaagagcaagactccgtctcggaaaaaaaaagaaaaaaaaaaagaatttttatatctactatcaccattaactcaaaaaattaaacaacaccaaagggtgggaagtgaccaagaaaagattctgcgttatctccattacttttttatttatttatttatttatttatttatttatttatttatttatttatttttgagacagagtctcactgtgtcacccaggctggagtgcagtggtttgatctcggctcacagcaacctcggtctcctggacccatccattactttaataaaaatcagatttactgaggcataatttacacatgataaaaggcatccatcttaagtgacagagaaaagtagaaaggacaaaaatcttagattatagaacagttatcaaagaggaacaaattaagtttttaaaaaactcataactcacatttatttttctctttctaccgtgggttggtgaaaatttcatcggggctggtgcacaggtaaaagttaggagccaccatcctaggagtggcttaaaaaagggagcttttcggccgggcgcggtggctcacgcctgtaatcccagaactttgggaggccgaggcaggtggatcaagaggtcaggagattgagaccatcctggctaacacggtgaaaccctgtctctactaaaaatacaaaaaattagccgggcctggtggcacgcacctgtagtcccagctacttgggaggccgaggcaggagaatcgcttgaacccaggaggcggaggttgcagtgagctgagattgcaccactgcactccagcctgggcgacagggtgagactctgtctcagaaaacaacaacaacaacaacaacaaaaaactcttctcaatatggagagccttggagatagccattgaggatcccttgccagagagtaggaagttgtaggcgagggcacccctcaaggcagggtggtgactgtagagtcaggggagaccattcttgagaactcactcattccttcattacctccagccaatatgcttttttgtttgttttacgtttagcctatcagcttatcactgtggtgatcgcagccgcgggaggtgggctcctgctcatcctaggcatcgcactgattgttacctgttgcaggtaagtgatgagagttcaggttccaatcccgttcctttgcctgtgctatacaagggtcagtttgtattcttttacaggatacttgagatggttcacaatattaaaccataatgtgtgactaacccatttttaaaaaaggagaaagggaattcacgatagttggtgcctgtgaggaaaaagaaggggagtaaatggaacttcattttctttattagaaaagaatagctgaaagcacaagcaggaaatgaaaaaagaaataaactgggcttcatcagaattaaaaacttttgtactccaaaggacactatcaagaaagtgaaaagacaacccatacttgcaaatatgggttgcatgagaaaatacttgcaaattatgtgtctaataagggacttgtatctagaatatagaaggaactcttacaactcaacaacctaattttaaaactggacaaacacttgaatagacatttcttcaaagaagagatacagatggccaataagcacattgtcttagtccattttgtattgctgtaaaggaatacctgaggctgggtatattagtccatttttatactgctgataaagacatgcccaagactgagcaatctgcaaaataaagaggtttaatggacttacagttccaagtggctggggaagcctcataatcatggtggaaggcaaagaggagcaagacatgtcttacgtgaatggcagcaggcaaagagagagcttgtgcagggaaactcccccgtatagaaccatcagatctcatgagactcatttactatcatgagaacagcatgggaaagacccacccccatgattcaaccatctcccaccaggtccctcccacaacacgtgggaattcaagatgagatttggatggggacatagccgaaccatatcaatgggtagtttctaaagaaaaaggtttatttggctcacaattctgatggctgcaaattttgagattgggcgtctgtatctggtgagggcctcaggctgcttccactcctggaagaagatgaagggagccacctgatgagaaagaaagcaagaggtggggggctaggggagaggtatcaggctcttttgaacaaccagctttcccaggaaaggtattagtcctttcatgagagatctgccctcatggcccagacacctccctgtaggccccatcccccagcacctccacactggggattaaatttcagcatgagactgggtggggacaaactatatcccgatcgtggcacacacgaaaagatggtcaacatcattagtcacctaggaaatgcaaatcgaaaccaccatgagacaccacttcacacccactaagatggctattaaaaaaaaaaaaaatagaaaatagctgctgggcacagtggctcagcctgtaattccagcactttgggagttcgaggcgagtggatcacttcagatcaggagttcaagaccagcctggccaacatggtgaaaccctgtctccgccaaaaatataaaaaattagctgggtgtggtggtgcatgcctgtaatcccagctactcgggaggctgaggcaggagaattgcttgaacctgggaggcagaggtgcagtgacctgagatcatgccactgcactccagcctgggtgacagagccagactccgtctcaaacaaaacaaaacaaaataaaaaaacacctagaaaataacaagcattggtgaggaagtggaaaaatcagaatcccccatacactgctagtgggaatgtaaaatggtgcagccgctttgaaaaagtctgaaagttaaagacagagttaccattggacccagcacttccactcttaggtatatcaagagaagtgaaaaggtatactcacacaaaaacttcacgtcaatgttcacagcaacattatttacaatagccaaaaggtgaaaactctaccaatgtttgtcaatggataaacaaaatgtgatatatttctacaatggaatatgattccggcataaaatgaatgaagtactgatacatactataacatgggtgaaccctgaaaatacgctaagtgaaacaagccagtcccaaaagaccacctactgtatgattctatttatatgacttatctgaaataggcaaatctaatagagttggaaagtagattaatggttgtctagggccagaatggtggggaaaaggggagaattggaagatggtggctaaggggtatggggtttcttcttggggtgatgaaactgttctaaaattgtgatgatggttgcacaagtctgaatatgccagaaaccattaaatgagtgaatcgcatgatatgtgaactgtttctcagtaaagctatgtacagaaagagaagcagacaaagaaagatgaaatatttttgcagtagagaagttgtagcagcagtgtgggatgctttgggcttcctggaagccactgagattgggtttctattggaaaaggaagagaaaggaggaaattgattccccttctctgtgatgatctattcagataagggaaaattatgacctctgacttagatgataataatggcaggaattatctagatgtaacagatggggggaacctcccaaaatagctagttatcttttctaccgttgacataaaggacattttaagatatcctctgtcttcaaaaaggcagcagagagcaatgtgccctaactgcccaactaggaatgcagcccttatggtatagcctttgcctattattttccaaattgccatcaaatcatcaaagataaaccatatgagtggaaataaacttcaggggatgagactaggaatggttacctagagggacataacctgagcgctcaagggacagaagcctcatatttgctacgtgttctgtactgtgtggtgtacccatttggggaaggagcctgtgcctgctggctcctgagaagagaaggtagttgtgcatgagtatgtcattgtctgagcccaggtaccccacccaccaggaagcaacacagtggcaggtctgttcccaacttccacaaagagccagcacctaagccacatgctagacatttggttttatgaccctgagtcactttttgccttccctagaaaacttatttgtactttaagtgaggtagaaagaaaaagatttcagattatcctatctgtgacaaatataatttaaaatttctgatcctggaccggttagataggtgaagaacacagattccaacaatttgcagtcagtgagatctcacgagtagcatttctgtaacctgctgaaatgagaatttgtacaggtgtataaataggtgggctttttcataaacaaaccattctgtttttatgacttgtgaaatatttgcttcgtgtagtagaaagagcactgcccggagagttggaggcctgaattctagttccaaaccttctagtagcaaaaggtgacccagaggacaagtcaggtctctttactgagttggagctgccccatcctatccccagagctcctgattcagtcaatctgggggagacccagactcttcccatgtaaattctgatgcttgggcagcttgggatccactggactagaatgagtctaagggcccctctggctccagcattctgtgaatttatgacccttgttttcctggccacccccaagacacagtgatctctgtcctgtagaagagtctaaatctgccctattgctgctgtttttgtccccctaccccctgataatctggcccctttgggttggaagaatttttgtatctttttttgcacctaactgcatatttacttgttgtaggcaaataccaaataacaacaataataatactactcagtgggcagctacaaataaatataatggtagctttcagttgaatttacattataaaatcatagttggtgctttcacagtatcacttctttacagaattgagctttacaaatatttttgtatcccacagaaagaataaaaatgacataagcaaactcatcttcaaaagtggagatttccaaatgtccccatatgctgaataccccaaaaatcctcgctcacaagaatggggccgagaagctattgaaatgcatgagaatggaagtaccaaaaacctcctccagatgacggatgtgtactactcggtgtgtattcctgtgtcaggatgaccccagggcccccggttcctctgagaagtaaaggaattctgttttgttgtagtaaaagcattacagttagttaagggttaaagagtagtggcatgaacctctgatttactagtcagtttacctacagtctatttgcatggtacttatcagtgttgctattgaggtatgaaggatatttccataaagcacattatatttatgtggttgtagcagtaaccctcttgttactaaacttggcttttaagttataggaatggaaactgaaaggtagagcaagaatttagtgatatttagcctttggccctttcatttttatctcctgtctgccatgcttaccttgtgtggttaggtacttagaactagaggattggtggctgggcacagtggctcacacctgtaatcccagcactttgggaggccgaggtgggcagatcttgtgagtccaggagtttgagaccagcctgggcaacatggtgaaatcatgtctctacagaaaccgtgctcatctctacaaaaaattagcctggcatggtggtgctcgcctgtggttccagctacttgagaggctaagatgggaggattgcttgagttggggaggcagaggttgcagtgagccaagattgcaccactgtactccagcctgggcaacagagtgagatcctatctcaaaataataataataataataataatagcaataataaacaacaacaacaaaaaaaccaactaggggatggggaaaaggtataaagagaacaacaattcaatgtcgtcctcaacaagcacttctcaggtttagaatattgtatactcagtaggcctttaataatttgctatgtccagcctggactgcatcatttggaaaggtaggagacaaccttgaacccttgctgcctttctcccatattgaatttaacctgtgtcatattcctgtaaactgcccagctcatttcatatcactgtatcaaccataaagcaaacacgaacaggcgtatctgagctgaaaagtaaacagttatcaggtgacttctcgtgccatgtggagctgtctgaggaatagcaataaatgtgaaaccttgccccgtggggacttaatggtgttagacaatcttgtgacagaaaccataattcctctggttgctgtggcaattgaccatggggatgcagactttggatgggagggacaagtttgttcatgctaagaagctgtttatttccatggactctttttgaaaaatttgaacctagaggaagaacaaaaagttataaataaggaaaaaaacataaagaaatacaaacttagctctagcaaaaatattcccattgatatttctgcattgggctttgtttctctgtttatcaggaaagtccttttcctttactaactgaagctataactgagctggtattttaccctggtgtgtccccacactctcatcctttactcgggactcctcagccccagcacggttcaataactagcaacaaacaggcctgtgacatcataggaaccaacttcactgcatgtttccatggtattaaagagttaccttaaataaacgtagtcaagaatgtaaatgaaccccatttttattccaaaaatagcaggctggccaggcacagtggctcatgccgataatccctgtaatcactttgggaggccaagatcgggggattgcttgaccctaggagttcaagaccagcctgggcaacatggtgagaccctgtctctacaaatttttttctttttttaattagccaggcatggtggtggacccctgtacatccagctactcaggaggctaaggcaggaggatcacttaagcccaggaggtcaaggttacagtgaacagtgtttgtgccattgcactccaggctgggcaatagagcaagaccctgtctcaaaaaaaaaaaaaaaaaaggccgggcgcagtggctcacgcctataatcccagcactttgggaggccaaggcaggtggatcacaaggtcaagagatcgagaccattctggctaacatggtgaaaccacgtctctactaaaaatacaaaaattagctgggcttggtagcatgcacctgtagtcccagctactcgggaggttgaggcaggagagtacctcaaacccaggaggcaggggttgcaatgagccgagattgtgccactgcactccggcctggcgacagagtgagactccatctaaaaaaagaaagaaaaagaaaaagaaaagaaaagaaagaaagagagggaaaggtaaaaaaagaaaaagaaagaaagggaaaggagaaaggaaaggaaggaggaaaagaaaaagaaagaaggaaaaaaatagctggctgagcagtctgtagaggcagagcctaagcttagggcatgaagctgtcacctgggtagacaagctgttccacacagtgggctcaggtgtcgtccaggtgattcccacattgggctctcctgcaacttatttatgatacatagtagctagtattttatttctgccaagaaataatttacctttgttgctactttgaaggcctcctcaaagtagcccctcttattcccagggagcctttttttgagatccaactggtcacttgaggattgctgttggcctcctggtttggggtcctaactccacctgcaactagatggtcgtaggaccttataaaggtcagttcctccgtttgcatcagttgccttctgcatggttgctgggacaggaaggattaaagtgggttgtgctccagagagaaagatactttaaaaaaattagaaataattggtagaaccacatcatacaggataaacccagatcttttcttacattggtctaaaatcattgggatttaacactgcaatttaaacccaagaatgataaattgacttttcttcttttctctttggcaaccagcctacaagtgtaaggaatccagaacttgaacgaaacggactctacccggcctacactggactgccaggatcacggcattcttgcattttccccggacagtataacccgtctttcatcagtgatgaaagcagaagaagagactacttttaagtccaggagagagagggactcattgctctgagccagtcacctgggacctctgctcagaggaccgcaccaggaggctgcgcccaggatttgtcgggagccacgctgagtggcaagcaggaagagggacaggcatgcggggcgtgaccacagtggaggagacaggtggatgtggaaccacaggctgctcattcagcacctttgttgttactgtgaacgtgaatgtgggccagtatcaagagagtctctctgagtgactgcaccatggcactggcaccagggcgactattagccagggcagaccactagacttcagtgcagggacctggttttcccttcgtttgcactttagtaaattgggtgggaggtttccttttggatctgttttgagactgttccagaaagaaggcttcctttcccgagacacttccataggcagcaatttggtgattcatttgcagcaaaatactggcttgttaattattttcctgcccagcgcctgcgtgctaaacaacagatgaggatgagcgtaccactgaagtctgaagatgtcgccattgaacggacagtgttttcatatgtttctaggttgtcttatgctacagtttccaagccagcccccacagtgaggaaatgtgtgaggcaccgcacacaactgcaatgtgttttttaagtcaaggtgacacatgtatttaagatttttttttaaaatctctttgcagttaaatctcactttttcaaacaagcctggatcagggcaaaacaacttatatttggttttagctggaggctcagcaggcagattgcaggcaggggggcacttttcatccatgagggcccagcctggggcctgggactctgatcaccattgtggaggccagaggcagctgcgtatggaggagaaatgtcaaactgaacgcaggtttcaccactctaggaaagcagcttgttgagcccctgcagctggatgtggttagagggatgggctgaataggcaggttagatttcctgcatcaacagtgctttgggaagctgtgtggattcctgaggaagaacagggagccgagatggagccacacatgagtttgctcaccggctactgcagcactttgtacccagaatctcatgtccacaaaccccatgtaaactttcaaccactcaaagctgtttattcggctgaagaaataacttttttttctcacccagtcatttgtacctcttcatatggctatgtcgcaccctccagaaacgtggttatacttccagtcagtgtgggagaactgaagacttccggttggtcgaggaactgagggttgaccttcgggaaggaagttccactcatcttatttattatgcctgtgatgtgggtcctgccagggagacatccagtactcggtgtctttaattgccacctggggaactgtgtttattggccttctttggggcatcctggttttggatgaagtgaggggaatacagaggtaaaagaattgtctccaccctgaagcggggagtcccgcttcacatttctggaaatggtgcagccactggggacagttctgccccgggcatggttgtttcttcaaggtcctctaaatataatccctattcttacataatccttggccctgatggttttaagcaagaactcctgtgtcccatggtctccaccactcaccatcaccctgctgtagcaagagtcctagtcaggggaggtgcattttagtagttaaattgcacttatccatgagataaataaaaggagaactgtttttatcagtggaggctaacctaaaatttcaaagtgtcgcctttttgaaatcttgggcctctctctctgtagaaccaatggccctttgtggctcacggcctcgcacctaactggagagttctgagctcctgcagctcacctgagcccacagactaggcttcttggctccttccgcagcatgcctgctcacccccagaacccgcagctgtgggaagagccatgtagggaggctattcccaggcatacacttccactgccttcagctgacatcacagctgacaaatcatctcctctatcggagccagaagacttcagctccacaaaatgaagtgttctgtcctgaaaacattcttgggaagaatcccaacatcgagaaaacggtgtcctgtgagttccaacaatgcttcttgttcatgggtttcttccgtatggagtggattaagagtgttttattttgttgttctaactgagaaaaaaaggaggcacccacaaggttgaggtcacacagtctccacagtttccaggaggcgtttgggggtggggaaggcacctccagagcatgaggctctaaggggacatgagtaaagcatgtctgtgacccagtgaggaagggagaggccagctgcactcctgcacggggttcctagctgcagaagggtcccgcctaggccgaggggaaacacctgatagcagaagaggcctggatgcacacctggcacgccgaggctctccgcccagacacagtgctccatgtcagcccctgcacctggggtgtgtgattcacgtgcacagatgccacaatcctgcaccaatatcccacagatgggggaaggtgagaggaaggggcaagtgatgtgtaactgctcaagagatgcttaaacctccatagagaggagccgggcgcaggggcatctgtgtgtcccgtcacacactgcagcagggaagggtggctggctggctccctggcatcagtggtttggtttaagctccagagggtcttattgccattgtcttttcctctgccccttgagccagcctaaggccctggagtctgtttctttaggcggatgaactgacatgctcctaccatgaccaggctctgggcaaggctcctcacagtatccttgagaggtgggcatggaagtgcccatttctcaggtacagaaaccttcagagaggataaatagcttgccctgtagaagcaggactgaaacccttgtccgcctgactcccccagctactctgcccactgtagccccctgccttactgtcctggcacacccctcaccatcctgtataccttaaatatcaaagagggcaagagagaaagggctttaaagataagttatttttttaaggaaccttaatattatttttaagaagtaaccaaattagtgacgtgaaatgc

SEQ ID NO: 307 - DNA, 5064 bp, Homo sapiens
atctgccccactttctgtctcacaaacaaccttgccacagtcatcttctacccctgtcctgcccagggcaagggagactcctgtgacttcatttcagacatcaacaatgacatcattcatgacaatgctccatagtagtcaaactgcagaccttaagagccagagcaccccacaccaagagaaagtcattacagaatcaaagtcaccaagcctggtgtctctgcccacagagtccaccaaagctgtaacaacaaactctcctttgcctccatccttaacagagtcctccacagagcaaacccttccagccacaagcaccaacttagcacaaatgtctccaactttcacaactaccattctgaagacctctcagcctcttatgaccactcctggcaccctgtcaagcacagcatctctggtcactggccctatagccgtacagactacagctggaaaacagctctcgctgacccatcctgaaatactagttcctcaaatctcaacagaaggtggcatcagcacagaaaggaaccgagtgattgtggatgctaccactggattgatccctttgaccagtgtacccacatcagcaaaagaaatgaccacaaagcttggcgttacagcagagtacagcccagcttcacgttccctcggaacatctccttctccccaaaccacagttgtttccacggctgaagacttggctcccaaatctgccacctttgctgttcagagcagcacacagtcaccaacaacagtgtcctcttcagcctcagtcaacagctgtgctgtgaacccttgtcttcacaatggcgaatgcgtcgcagacaacaccagccgtggctaccactgcaggtgcccgccttcctggcaaggggatgattgcagtgtggatgtgaatgagtgcctgtcgaacccctgcattttcattttcgttagaaccttcgtgacagagtttaaattaaagagaacttttcttaatacaactgtggaaaaacattcagacctacaagaagttgaaaatgagatcaccaaaacgttaaatatgtgtttttcagcgttacctagttacatccgatctacagttcacgcctctagggagtccaacgcggtggtgatctcactgcaaacaaccttttccctggcctccaatgtgacgctatttgacctggctgataggatgcagaaatgtgtcaactcctgcaagtcctctgctgaggtctgccagctcttgggatctcagaggcggatctttagagcgggcagcttgtgcaagcggaagagtcccgaatgtgacaaagacacctccatctgcactgacctggacggcgttgccctgtgccagtgcaagtcgggatactttcagttcaacaagatggaccactcctgccgagcatgtgaagatggatataggcttgaaaatgaaacctgcatgagttgcccatttggccttggtggtctcaactgtggaaacccctatcagcttatcactgtggtgatcgcagccgcgggaggtgggctcctgctcatcctaggcatcgcactgattgttacctgttgcagaaagaataaaaatgacataagcaaactcatcttcaaaagtggagatttccaaatgtccccatatgctgaataccccaaaaatcctcgctcacaagaatggggccgagaagctattgaaatgcatgagaatggaagtaccaaaaacctcctccagatgacggatgtgtactactcgcctacaagtgtaaggaatccagaacttgaacgaaacggactctacccggcctacactggactgccaggatcacggcattcttgcattttccccggacagtataacccgtctttcatcagtgatgaaagcagaagaagagactacttttaagtccaggagagagagggactcattgctctgagccagtcacctgggacctctgctcagaggaccgcaccaggaggctgcgcccaggatttgtcgggagccacgctgagtggcaagcaggaagagggacaggcatgcggggcgtgaccacagtggaggagacaggtggatgtggaaccacaggctgctcattcagcacctttgttgttactgtgaacgtgaatgtgggccagtatcaagagagtctctctgagtgactgcaccatggcactggcaccagggcgactattagccagggcagaccactagacttcagtgcagggacctggttttcccttcgtttgcactttagtaaattgggtgggaggtttccttttggatctgttttgagactgttccagaaagaaggcttcctttcccgagacacttccataggcagcaatttggtgattcatttgcagcaaaatactggcttgttaattattttcctgcccagcgcctgcgtgctaaacaacagatgaggatgagcgtaccactgaagtctgaagatgtcgccattgaacggacagtgttttcatatgtttctaggttgtcttatgctacagtttccaagccagcccccacagtgaggaaatgtgtgaggcaccgcacacaactgcaatgtgttttttaagtcaaggtgacacatgtatttaagatttttttttaaaatctctttgcagttaaatctcactttttcaaacaagcctggatcagggcaaaacaacttatatttggttttagctggaggctcagcaggcagattgcaggcaggggggcacttttcatccatgagggcccagcctggggcctgggactctgatcaccattgtggaggccagaggcagctgcgtatggaggagaaatgtcaaactgaacgcaggtttcaccactctaggaaagcagcttgttgagcccctgcagctggatgtggttagagggatgggctgaataggcaggttagatttcctgcatcaacagtgctttgggaagctgtgtggattcctgaggaagaacagggagccgagatggagccacacatgagtttgctcaccggctactgcagcactttgtacccagaatctcatgtccacaaaccccatgtaaactttcaaccactcaaagctgtttattcggctgaagaaataacttttttttctcacccagtcatttgtacctcttcatatggctatgtcgcaccctccagaaacgtggttatacttccagtcagtgtgggagaactgaagacttccggttggtcgaggaactgagggttgaccttcgggaaggaagttccactcatcttatttattatgcctgtgatgtgggtcctgccagggagacatccagtactcggtgtctttaattgccacctggggaactgtgtttattggccttctttggggcatcctggttttggatgaagtgaggggaatacagaggtaaaagaattgtctccaccctgaagcggggagtcccgcttcacatttctggaaatggtgcagccactggggacagttctgccccgggcatggttgtttcttcaaggtcctctaaatataatccctattcttacataatccttggccctgatggttttaagcaagaactcctgtgtcccatggtctccaccactcaccatcaccctgctgtagcaagagtcctagtcaggggaggtgcattttagtagttaaattgcacttatccatgagataaataaaaggagaactgtttttatcagtggaggctaacctaaaatttcaaagtgtcgcctttttgaaatcttgggcctctctctctgtagaaccaatggccctttgtggctcacggcctcgcacctaactggagagttctgagctcctgcagctcacctgagcccacagactaggcttcttggctccttccgcagcatgcctgctcacccccagaacccgcagctgtgggaagagccatgtagggaggctattcccaggcatacacttccactgccttcagctgacatcacagctgacaaatcatctcctctatcggagccagaagacttcagctccacaaaatgaagtgttctgtcctgaaaacattcttgggaagaatcccaacatcgagaaaacggtgtcctgtgagttccaacaatgcttcttgttcatgggtttcttccgtatggagtggattaagagtgttttattttgttgttctaactgagaaaaaaaggaggcacccacaaggttgaggtcacacagtctccacagtttccaggaggcgtttgggggtggggaaggcacctccagagcatgaggctctaaggggacatgagtaaagcatgtctgtgacccagtgaggaagggagaggccagctgcactcctgcacggggttcctagctgcagaagggtcccgcctaggccgaggggaaacacctgatagcagaagaggcctggatgcacacctggcacgccgaggctctccgcccagacacagtgctccatgtcagcccctgcacctggggtgtgtgattcacgtgcacagatgccacaatcctgcaccaatatcccacagatgggggaaggtgagaggaaggggcaagtgatgtgtaactgctcaagagatgcttaaacctccatagagaggagccgggcgcaggggcatctgtgtgtcccgtcacacactgcagcagggaagggtggctggctggctccctggcatcagtggtttggtttaagctccagagggtcttattgccattgtcttttcctctgccccttgagccagcctaaggccctggagtctgtttctttaggcggatgaactgacatgctcctaccatgaccaggctctgggcaaggctcctcacagtatccttgagaggtgggcatggaagtgcccatttctcaggtacagaaaccttcagagaggataaatagcttgccctgtagaagcaggactgaaacccttgtccgcctgactcccccagctactctgcccactgtagccccctgccttactgtcctggcacacccctcaccatcctgtataccttaaatatcaaagagggcaagagagaaagggctttaaagataagttatttttttaaggaaccttaatattatttttaagaagtaaccaaattagtgacgtgaaatgc

SEQ ID NO: 308 - protein, 620 aa, Homo sapiens
SAPLSVSQTTLPQSSSTPVLPRARETPVTSFQTSTMTSFMTMLHSSQTADLKSQSTPHQEKVITESKSPSLVSLPTESTKAVTTNSPLPPSLTESSTEQTLPATSTNLAQMSPTFTTTILKTSQPLMTTPGTLSSTASLVTGPIAVQTTAGKQLSLTHPEILVPQISTEGGISTERNRVIVDATTGLIPLTSVPTSAKEMTTKLGVTAEYSPASRSLGTSPSPQTTVVSTAEDLAPKSATFAVQSSTQSPTTVSSSASVNSCAVNPCLHNGECVADNTSRGYHCRCPPSWQGDDCSVDVNECLSNPCIFIFVRTFVTEFKLKRTFLNTTVEKHSDLQEVENEITKTLNMCFSALPSYIRSTVHASRESNAVVISLQTTFSLNVTLFDLADRMQKCVNSCKSSAEVCQLLGSQRRIFRAGSLCKRKSPECDKDTSICTDLDGVCQCKSGYFQFNKMDHSCRACEDGYRLENETCMSCPFGLGQCGNPYQLITVVIAAAGGGLLLILGIALIVTCCRKNKNDISKLIFKSGDFQMSPYAEYPKNPRSQEWGREAIEMHENGSTKNLLQMTDVYYSPTSVRNPELERNGPAYTGLPGSRHSCIFPGQYNPSFISDESRRRDYF

SEQ ID NO: 309 - DNA, 88030 bp, Mus musculus
  misc_feature (1)...(88030): n = A,T,C or G
agagaggaggaaaggagagaaggcaggaagaaggcaggggaagataccaccatgctgtgctgtatgagaagaaccaaacaggtagagctaaagatttcttttttacttctttgctgttgtgaaattatcagagtacagggtttcctcgtgaaaggcagaaaaaaaaaattttttttttaaaaaaaaactgcttctgccctggcatgatgctctggcttccttagcatacggtaactgatgcttgcatcccggcgttattcttttctgcctttcatgatctggtttttggaatgctgctactaattagggtaaggggagagaaatatgccggcttggctagaaatatgattcccctcgcctattagtaagtgctcagccgctaggtctctggttttgagggtgtggatgcagaaaggggtgtggggacgatgtgggctctatctacgagatcaaaaaagctaatcttgatattatttgtggaaaattaggtctgggggaattatagtcacatttcaacattgcctgttccgtgattcaaattttctcacatgtgccgcggaagatacctgatttcgtgctcgcgtgagcttcaaaggggcgcaggtgtatgtgggaaaacatgtgaaggttttatttatttatttaacgaatgaatgaaactgatttaggagattttttattttttaaagagagcctaaagacaacaagggttgggggagaactgcctatgccgagggggaaaacccccttcctgagatcaggaacggattgtgtgccagctggtccgggaagaggatggaccacgcccctaggagctttgagctgagatgggatgggaaaggggagccgagcccgtattacctgttggaaaccggggcttttctctttcccctcttcctgtgagtctttgctggcattagcagtgacctgaggtgtgttaatatcctggaggagggtgactcgtggtcctcaggatgagggactgtccaagaggannnnnnnnnnnnnnnnnnnntcccaatcccccacctcccctcccccaccgcctagattatttttttccattttatttcaaattgctcacttatttcgtgaaagacgttttagaaacttaattgaggtgagggtgcttgggatcctgcagtcatccacagcacaggaacgctctccaaatgtagccttcaaacacccctaggagcatgtttgagtgatttttagagaaggttaagaaagaaaaaaatgggtgtggggttggaatgagtgtgtgtgcctgtgtgtgagtgtgcccatggcggggtggggtgggatggcagtcgtggttgtagaccccctctgcaaactgattgctgtaagggcggggtgcaagacaggggtatttggcattattcttgtgcaggtattggaaattggacaatttgttagacactttctgaatccaaaggggatgggggagggtacagaggaaacagcccttcagcctggccacatgcagccagcgccctggaaggaggggtggggggtggggaagaggaaggactagaaaaagaggtaaaagccaaatgccaaagtagttagaggagaagcaagcctacaataaacaaacaagcaaataaataaatgcagatccttggctgtgaaggggtgaatggagaaaagtctggcaaggcggggcagggggggtgttgctgcctgtatttctctaactgctcttggttccagaaactgatacttccattggaacatttgtaaacatttattcccatgtcttccttcattttgatatatgaatgtaacagatacaggtgccagggggttaagcacaccctcagaaaaaggttgcaagatgactgcactggccagctggtaaaatacaatttaggaaggtggagccttaaggaaaccaatgctattcgttttaaaggcttggattttggaaagaaaagtgtggctggctgacagcttgttcccaccctatttttgtgcatgggagtatccacacatatccttcagtaaagggaaccaagcatggtttatagacagggaattggggctaacggaattccctcccaaaagaatgaggacagctgcttccactagcttcctctcactgacagcccggagcacacactctgatgtgcaaagtgatgaagatgaaattacgtgtttagggacttgtaggaatttgcatgtaaatgtgtacagcatgcacatacttccaatgcaaccattacgcatgtgctctgtatggatttcacatgcctccctgtgctttagcatcactgatgtgaaggaggaaatggaatgtctagcaacggttctttctacgcacatgttttatgaataggttcttaggtatgaaatggttatgtgcctccatgtagcaacattacttgtcatttgcatatgtcagtatttaaggtattattaaaccagacagaaggaaatggtgtcttcagggcgtgggctcatattacattgactggtattcatatagtatggatacttaagtctcgtgctggcttccttcttgtgaaatgaccctctatcattccagtcagaatccaagggtttcgttccttctcctggaaggtgtttatcactccagcttttttaacagggactaaaatgagggcaggaacctgcaaaggtctaactctgccacacccatgaaatccagcagggatgtgggagggggactggagggcttgcacttccttccccttccacttgagcagcaaaagcaagcagtctcagatatttccaagttgtaatacattgccagtgggtgtgaagaacacttaaatgatctctagtagccattacttaccactgtacattattaaagcagataagggggggggggactacaaggaagtaggtaaaggagggttaaaataaaagaatcctgcagattttattggctcatgattttcaaatatcttgaggcttactttaaatagctcaattaccatgcatattgcagacgattaaaaacttgcaaggtgtgatagtctacagaggggggaaaaatgtgagatgtttcttttgtttaaaaataatgactttagtttgtagcttaagtgttaaaaaagacattaccctgcaagcaagcagacctgtccccacctcactctgctggcatctgccccctccccatataataaataatttttatctttgagaaactacacattggtttagaaccccagccttgctgttccctctttctaacagcatggggaggtgtggaagggtccagctctgctgctgggtagggaccattctttctagtaagaaattggatccctgctcagtgtctctgagccacacccagtgtcatccagggacgtagtgaatggattcaatagaggccttctacttaatataattgaagctgtccatttttaacaatcatggcatctaccatatgtttccaaaattgaacggaagaaattatttaaaagggttttttcccctttccccaaatcatctggactttcagaaaaccttccacagtttgtggtgaatttagcaatgcatttgtttctgattatttaagttgtaccatggcacatgcacagtgaccccctgatccttcatcctctgaatgtcacagtgctcccgctcactctactgcaagctatgctgaggcaactggaggaaggaaacacagggttaattttccttcttgctgagctggtgaaaactgcagaaacctcctttgatgttgcaagcaaagggcaaagttcctgctcaccaagagggagggtggcccagggtcttcttctgtcatagggaaattgctagtgacatgcctggggcagaatgaatccacagacttcagagttttacttggtcccatagggaaggggcagagggcttccaggcaagcatggagctcagtattaactccttgtacacccaccacacccccactccccagcacgggtcatactgactttaacatacttctaaaatcttccactatggaatgaatttcaagagaaacctttctccaagttcatcaagagcaggcacagcatttaaccctttcacttcttggttaattctaggagaggaagtgttacttgcaaaccaaagaaggtaaattgggccagtatcctgcctcttggattttgaagtgtagacaggttgtctccagacagttgaaatgaaatctttataaaaaagtctccagggagcactgagctgtgagaccccacagtgtgtgccacttacagacttagccatattgaatggctcacatcatggaagggttttagttgcttcctgtcaggaggactgaacaactgaaggactgaagctgtccaactgaaacgctaaataaactgccccaccctacttactttaaagggtgtaataaggatttcctccaatctggacaggacagccatcccccccccccccgcccacacacacacacacacacacacacacacacaactgccaggacagacttggttacccctgatcacattgagcgctccatctgcctggattcttttcttgcttttttctctgtttcctcactgactcctgctctattcccttgagatccctccagtttgtaaagctttagctggtttccctgtggtccgtgaaagagctttgtctcctctgttctagagtcttctgactgcatccccatctctacaggttccctctcactttcctttcagaacaacgtttctaaaagcatcccaagctcatgtctcactcatcatttactgttctacctgcgtcacttcccatgattccaatgacacagggtaccatttcaggtgagccattagctttcatcttacttgaaagccgtggcatgctgtctattgctctgccatctaactgtccttcctggataattctcccaacaccttttctcctcaaacaggacctttaaaaactcatttgatgtctgctttcactcccctgtccttcttggacaggggctttcactgtgtaatcttggttttcccgtcattccactcattaatcccagttcaacacatcaatgttcagagcttcagtcctgtcctgtgatttccagaggtccatcttgacctataggagcttttcagaaaaatcctagttttctcctgtgtggactggatcaggtatcctctggtttggaccactcctgggctttctgcttagttgctctagcaatgcttagccagcttcagaactctagaaatggaggatgtgtcccaaccatggtcctttcctccaaagcccacattcaggtacagactaggtaaaaaagttttgaacattttctctgctttcccacacttagttgtttgtgtaagtaacctggctcagtcttttcattagctttcatctagctaaagacaacagctacctgtatggatcccagtcccatattttttctttatagtctccatgcaaacaacagacaaactgtctttacctcatggaaatctggtcacactattttcctcattaaaattctataatgtctccccgttggctataaactactaaataacccttcagcatgactggcatgacctagtcttgggccatctttaaatacctcctctttctcatcgctcgctttattcttctttcacagcctggaaaatgtttgtttcccttacaagagttagctctttaaatccacacttccataaatgaacgtcttctacaatttttatgagcatattgcattttgaactaaactctattaccgcttgttgtacaacctagtgctcatttttaatatgtatctgtacctaacttgtaaggttcttgtgaagaaaatgataaaatgttattcctttttatccataatgattatcatactgtctagcacacaggtgggtcctgtgaactgtgagtgatctccttgatagaaaagtatggaccagaggttttagtctggcctcaagctgtgatatattaaatggacagaatcattagcagtctttaaagatagcattggcgtgaacttttaaaatagaattcaccatccttaattgttgctacaaatgtatagacatggcagacttccattttttaatgcaagcaggcataaaattcatccacttgtagtcttcatttctccaaactgccatagcagagatctttccatatcaaccactcctagcaaccaacaagaagccagtcccaaaccagaggagaagaatcgcagtctagctatggctactaattcttgcagctccatgctggctttctttggaacctggtagactcatgaaccttactctgccctataactatcacagatgaccctgtgtctaccttctgctgcgcacagctgatttattcatgcagtatgtagcattagcctatgctgaagagtgtatgatcaataattaatattacctacatttgatacttcagtgagatacattctcactgaagtatctgaagactaatgtctaccaatgcatatcatgtgtggagctgaagggacagttaatagtaagtgatctcataaacctacagtaatagacaggaactaaatatacaggaattggctcttttaaatcttttaaaatttgaatagacttgaaggagttggatcctggtgcaagcctatggtgtccagtatggggaggattgcaaccacatatttccatcacatgactttaagcagtacattctcatagctcagctgggatatcttaagagaagaaatgagataaaaattgtaggtgaagtttgtgctttatagccaaagttggatggtgtttctgaaccctgatgtccttgtcgtgcatcttatgagtgctccaagcaactctggcttacaggtttcttttcttttctcctcccctccgatgcaaatgaagtttttcagattagtgcaccagttacagttagtgcttggtggttgaggctatgagaggagaatgttaaggagaagtctatcttgcccaactttccaatccatgctataggtaaatcaggtgctgatttggcatttcatggatgattagtacagaggggatgctcagttggcatatacttgatgcaagttggcatatacttgatggcatataccatgcagggatggagggctcatcatgatgagatctgaggagagatgatttaacactgaggacattcctgggtacccattcagaacagactgagtatcgcactcaatgctactggcctttgcaacagagtggctatggttgaagttaaagtcctctgtcttatttgctcagagtggcatacttaaagtcattttgggtttagtgttggactgtggaatttcacatttccaacccgtaattagttacagatcttgatttcttagatgttctttgtttaatgtcctgttccatgtctttgtagtgggaataaatccctcccttgggttctagacctggctctgccaattgcttgtcctgtgatcttaggtaagtaactgaatctctctgagcctcagtttattcatctgtattaatgggcaaaataaaagcctccaaatcctgactcactttcttgactaggttggtatgaggctcaaataaagcgatacaaaataaaaatatcttgtaaacaatttctttttgatcctccttggtggtcatggtgctacacaaacaagaagtaccattgttatctgcatagaaaatatatatgtttcataagcccctcctagttgctactaaatgttagccacacgggtagatgagagcatagaagatttttatcatttactttgaaaacctgagtgacagaatccagataagcacatacttaagttgtccttagcaacaaaatgtcaggaacatgagaaatgtccactgtttgcctatgtctctccctctcctccctctcccccctttccctttccctctccctctctccccccacctctctctctctctctctctctctctctctctctctctctctctctctctctctctctctctctcctccccctctcatttcacatgtcaatctcctctgtatttggtgtgtgctgcttgcccccacaccctcaccccacatgtcacctccaaactggcttctgagtattagcagacatgctgtgctcacatccatcacacgagggcccagccaggcagaagagggtggagggaaggtggggcttctctggagcctgaaaactggagctgctgcctggtcggaagcccagcagattatcacctggcaccacttccatatcggtctcaggtctcctcctgtaccacgaacaaaccttcatcaggagagcacagagccctgaatcttttaaaactcaagtcttaatgctctcagtgttcttccccacccccaggatctccataaaggatggttcagttctctcatgtccatggttaagactgggaaaggtgacctgtttaatgtaagaaaatttgtcagatttcacacaaagcaaaggaattctgcaagccccttaccccagacactgaggtttatatctgtagaaaatatttggaattattttaaaataaaatgatcagaacatgttagtacaaagattctgtctatcctagaagccaaacatctaaaataagaaaaccagcatcaaacattttacaaaaactacttttacataaaaatttccataaaggcttataatggaaagtatgttagtgatactcaggaacaaatggttgttcagaagaaaataatttattcaattatatttatagtttattaatggttaatatcacttttactctctctctctctccctctctctctctctttcatttcttctgttatttatgaatactttgattaggtaccagaatctaactttaggtgtccatgataataatgtttgaaggaaactaaaaattctatgaattataaataaataaataaataaataaacaaatccaaggctaaagcaaccagggcaaatgcgtaaatcttaacaacagaaaagcatgaacaccgcccccaccaggattctcatttaaaagagtcagtttccaggacccagcgtctttcctttttaataaagatatggagagaaaaggaatgagtgaggaataggagagagggagacagagacaaagagacagagacagagagacagagacagacagagagggagaaaattgtgttggtcttgcttgggtcagctactgccatttagacaattctctctgattgttagaaagcctaaggcaatagtttctggaagcccacaccggtggggaatagtcaacgctgagaaatactctctgcgtgtatttccacacacctaccatagcgcagctatggggtggatcactgagtttccctttgggatgttttcagttttgctgcctcacttactcatccttgatcccttctattgctgtgatatggtaccctgaccaaaagcagcttatgtagaaaagtatttcctttggcttatgggtccagaggcatagacataatgacagaaaggcacaatgatgtcagaagaagcacggtaatggcatggtgagctggaggctggctgatcactctttcatccacacatacaagaagcacagaaagagaaacaggggacactataaaccctgagaccccctgtgatgcacttcctccagcaaggcctcacttcttaaagattctaaaacttcctccaacaataacaccaactagagacaaagaatctatacaggagtctatgggggactcttttcattaatattatcacaatacatcattagtaggtctctaaaaggaatggttttctcacagattgttggatttgtgcacctgataaagagtagaactaatttatatacctggacttgaccaacactagttgtctactgacttctagaagcctacacatggcaggtaccagggttctaagaggaatccaagctatcatttgtccttgataacttggcatgaaataactcttagcttccagaatcactctatagaatcagttcctacccaaggattgggtaatattggatgtaaaacagatttattcaatttataccagaagagcactactccttgatattagtcatctcattttgaatgttcttgaattaattccagcaatcatcaccatatttatctatttttagcagattggcactttctaaaatattgagctgttgtctccatatgcactagtttgctctaaatgtagaacattggtaattagcctcacatccattatttgtaatcccggttccaatagctattaaaaatgttgttttttaatggaaattgaaaataccctaatatcttcccattaatgattgcttaagagagctcgaagaggcaaagacaaaaataagcagaatgaacttcagagcttaagcaaactcaggagtcagctgattttgaaagaggcattcgagcatcttagcataactagcctaggaacttagcttgattgtaagttgtcagagcgcacatcctcagctcattctttcttccctatggcttacaacccaatccacccagttaggcatgtaaatttgaggatgctagacctcataatagctattcccggaaggtgtgatatacaattttattctaatccctctactatctgaaggaaggaagggaaaattaaaatatatccaatttttacttacttagcttgaagttcatttcttagacacctgtgtctagctgttgtaaattctttattcttcagggcagctcactatggttatccatgcttttcgtgggttggttataacagaagaaaaggagttggtgttgagcaagctgaatacatctgtggtggatgttatatttcaaggtcccttccccttaaataggaaaaagtaacattttatttgagtggaaagaagaaatggcaatttattataaatccttccacttcatctttatatagatattttcttcctaacacagttttctgggatatttgtttttagtttcaagttttaataagtatgtgtgaaggggagaacattatggtttcactcaaaaataaccaactctttattgagtagggagttggtttatctaaaccttattttctgaggagtatcatctgtaggattttcttaaagccaatgaaaagactgaggctgtttttggtgttgtctggaaagtcaactctgggacttctgtgttggaattgtgcatttgttcaaataagttgcctattgaagtttcttaactcagtagtcttgagggctttaattgctttgaattcaagggcataaagtgattgactgcctttaggtagctcagccagatttggcttcatattagcaggcagtgaattgcaaaacaatatagagccttcgaggacaggacttaatgtcttatagattccatactagatttgacattggatccttacatgtcttctgtgaaacctggaaggaggagaagtggagtttttgtacaattgaaagggttacagttataaagcagaatcacttagctttctaatagaatatcccataaaatcagtgatgagcacaaatagctcagcctctacttcagaacttcatcttggaaaccaaacaccgaagagaaatgatattcagaaagcaaatcaagtacatgtggtacaagtgtgttcaagtatacttctccattctagggctaaactcagatatgctcatttagaaggaagaaactattgatccttggatgacaataaaaatgatcattttgctatcttaataagaacattcagtaacttagagttttctgccatgaaacttaagagtttttcctaaatgagcagtttaggaacattggaaactgactgtatgtgtaataaggtgtgtgtgtgtgtgtgtgtgtgtgtgtgtgtgtgtgtgtgtgtgtgtgtgagagagagagagagagagagagagagagagagagagagagagagagaggtatatgcatataaatccatataaaatagtaaaaggtaaactagtaaaaaagtcaagtttttttcttatgaaatttacagatattaaaaatgatgtttttcctttgatttgtctttacttcagaatatgcagcacatattctatagaaagacttaaactttccttggacaccgtctctacccttggtatgaacttaagcactagctgttctttgcttctcattttcattcttactgctttgggaagcttccttttgtggttaaatctcttcctaccctcctatgagtggagagtttctccacttgtgatgatttcacttacttccctggtactccaaggccttcccgcatcagccccatccctagatctcctgcagtgtatggactcatccttgccactcgccaggcagttttccatgattatcttgtgtctttatctgtgcatgaatcccataactgacttacaaactctgaagttaagatagctaagtgcatcatctggctcagaacacattgattgcaatgttgattgatatataatctgtggtgaactctgtattagatgtgcaagacacatgttccagcagagcctcaggagaacaaacggggctatgttatctgaccactttagaatgttcaaaattatgaacaatgcctccctctggaatctattttcttggcctccatgatgtacatttctgctggaatttttcctctgttttgtttgcacatcctctatccaacttctctgtggtttcttcttgctcttttttctatcaatctgtaaaacaatcgttattaaagtttttgccattattatgacataatgcagggcccatgagtgatctcatccatggccacacctctcatgtggatctgtgagtttcagcccggagaattctcaggctctccagaggttacattctagaggtttgcttattaactgtcccttggaaataggccttgatatcttaattaaaccattttctcatctagtcaggtaattaataaattagacagtctagtctctcctattatcaaatgtttgagggtattactagtttatgaaaacagcagtaaataaattaatgaatgaatagacagacagatggaaagaaagaaagaaaaaaagagagacagagagaaagaaagaaagaaagaaagaaagaaagaaagaaagaaagaaagaaagaaagaaagaaggaaggaaggaaaggatagaaagataaaattctgccccccatttgctccctttcctatccccaagctgttttcattcaccctgtcctcctgtggtcatctcaactgcagtcattgatggtagaaaccaaaaaatatagtctcccttttagtttcccttcttcaattctcaatagaattctcattcttctttcagaagccagagttatatcttaaaaagtgccttttgaaatgtgtgtttctgacatgtttcctctgtccctacaatcaaaccaaatgcataattactgaggccttttaaactgcttcctacccaggcttttatttctctggtttcttaaattcattctcctcttggtcactcaatcttttgacttccttttaatttataagacacatcaagagtggcttctctcgcagcagtttgtatatgttgatctccaggccaagaattctctttccactctttactgaaagggttattcccctctgtctgagttattttggaaacaccacatttcttctgtttttaagactgctcaaagtctgaatcagaagaaagatttgttaactttcttgttttcaatgtttttaattacctttcatacttccaagctatctcatttatatcatagactgtattgcaattctgtggtctcaaacaatgatgtccatcattttatcaaccctttcttcctttctaaacactttttttttctgattagagcccaccttccactccttatttgcaacatgcaattccagttacttaagtgtggttatcctctctatgtttcctgtattctactttaacatccaaccccagggtattatatgcatacccaccactatctctttctaaatagaaatttcattagagcaggagtcttgccccatttattgaccatgtataccatgtgactggtagggcaccattgaataggagataagcaaacagcccaaacaaatgaagaaatatcagtgtttaatgaggaccacgggatggcaaaatttggttaggactaagacaaaggttgccaaactcccactgatcaatcatagaaactgcccaattctggcacagtccataatagggcaactaatagatatctcacacagagctaacaccacacagtcctggatttcacccaagtaggaccagctggctgcctcaacaaataacagtcaccattttgtagaagggtgtttttattatgatcagaaatatagcaatactgacactaccaactactatcttattagtatggatggaaacaccaatggccagggagttgatgactttccaatattcaaaacctcatacacgtagagaaaagatttctgggaagtgggactgagttttatagaactctgatgagggggaatatacccttttcttttggaaacacagttctgcgaatcaaaaaggaagatgaatggctcatgaacattaagaaactaggtcattttttaactaaaaagctaactgacatagagaacaaacattcttttttttcttcttctttgacctacatgggaaactagtatttcttaagacttatcccacagcaaatgatagtataaattttaaaccaataactataaaaataagaagctccaaactaactacttttggaatatgttgcacatggaagtaaaatttggcaaggaccacaataatatcatcttcctgttcagagagcaaatgattacaagaaaagcaagatgaagctgatttaagctgaaaaagctgtgagtcacctttctcagttgtacattttttattttggtaattgtgtgggaggtggagaagatgtatgagtagtttgggttgctgagaaagtagattaggaaggcattcaatgttgttggaatttatttgatgatgtctggtaaagctaagacaagatactaagagacagaaccacaaagagccatttacaaaattaaaaaaaaagttgtttgtttgtttttccatctgagttatcgacccccacatgcatctgcttccagtcttcacagattatgactttaggtaattttcacaaaagaaccctggaaagaaatatataattacttctaaatcaaggctttggatttcctagttgatgcttatgttcataccacaggctcaggccacagtaaatgcacacttagttaccaatggtcatgtgttgtccaaggaatgaccaataaggcatttattttaattaaaccacacttaggatgcattctgtggaactcaagaggagtttcccaggacgccagtggcatttctacaggtctgtgtctaaggaaatcagactaggaaacgacaattatttctagcaacctttcttcaaataagctgatactacctcctaatgttaaaactaatacagtctcctgacctgaaatagttttgtctccactctgtgtatcaagattctgcttccaaacattctactgaaatatcacccattttacaaaatcacttcctaccattccaaactccctgcttctcactgcatatgcattctctgtagtgacctctatagcaatttcttcttatgttcttttgtctttttctacacaaaccatacattacaaaacacatagagcataaacacacatatactactgtactttatgtgtatgtgtacacatttgtgtgtacatgtgtctctgtatgtgtttgtgcatgcatgtgcacatgcatgtggaggagagcagtcaatgttctggtgtcttcaaactgcatcccacctcattttttaagttatcattaatttttgtattcattgacaannnnnnnnnnnnnnnnnnnnnnnnnnnnnnnnnnnnnnnnnnnnnnnnnnnnnnnnnnnnnnnnnnnnnnnnnnnnnnnnnnnnnnnnnnnnnnnnnnnnnnnnnnnnnnnnnnnnnnnnnnnnnnnnnnnnnnnnnnnnnnnnnnnnnnnnnnnnnnnnnnnnnnnnnnnnnnnnnnnnnnnnnnnnnnnnnnnnnnnnnnnnnnnnnnnnnnnnnnnnnnnnnnnnnnnnnnnnnnnnnnnnnnnnnnnnnnnnnnnnnnnnnnnnnnnnnnnnnnnnnnnnnnnnnnnnnnnnnnnnnnnnnnnnnnnnnnnnnnnnnnnnnnnnnnnnnnnnnnnnnnnnnnnnnnnnnnnnnnnnnnnnnnnnnnnnnnnnnnnnnnnnnnnnnnnnnnnnnnnnnnnnnnnnnnnnnnnnnnnnnnnnnnnnnnnnnnnnnnnnnnnnnnnnnnnnnnnnnnnnnnnnnnnnnnnnnnnnnnnnnnnnnnnnnnnnnnnnnnnnnnnnnnnnnnnnnnnnnnnnnnnnnnnnnnnnnnnnnnnnnnnnnnnnnnnnnnnnnnnnnnnnnnnnnnnnnnnnnnnnnnnnnnnnnnnnnnnnnnnnnnnnnnnnnnnnnnnnnnnnnnnnnnnnnnnnnnnnnnnnnnnnnnnnnnnnnnnnnnnnnnnnnnnnnnnnnnnnnnnnnnnnnnnnnnnnnnnnnnnnnnnnnnnnnnnnnnnnnnnnnnnnnnnnnnnnnnnnnnnnnnnnnnnnnnnnnnnnnnnnnnnnnnnnnnnnnnnnnnnnnnnnnnnnnnnnnnnnnnnnnnnnnnnnnnnnnnnnnnnnnnnnnnnnnnnnnnnnnnnnnnnnnnnnnnnnnnnnnnnnnnnnnnnnnnnnnnnnnnnnnnnnnnnnnnnnnnnnnnnnnnnnnnnnnnnnnnnnnnnnnnnnnnnnnnnnnnnnnnnnnnnnnnnnnnnnnnnnnnnnnnnnnnnnnnnnnnnnnnnnnnnnnnnnnnnnnnnnnnnnnnnnnnnnnnnnnnnnnnnnnnnnnnnnnnnnnnnnnnnnnnnnnnnnnnnnnnnnnnnnnnnnnnnnnnnnnnnnnnnnnnnnnnnnnnnnnnnnnnnnnnnnnnnnnnnnnnnnnnnnnnnnnnnnnnnnnnnnnnnnnnnnnnnnnnnnnnnnnnnnnnnnnnnnnnnnnnnnnnnnnnnnnnnnnnnnnnnnnnnnnnnnnnnnnnnnnnnnnnnnnnnnnnnnnnnnnnnnnnnnnnnnnnnnnnnnnnnnnnnnnnnnnnnnnnnnnnnnnnnnnnnnnnnnnnnnnnnnnnnnnnnnnnnnnnnnnnnnnnnnnnnnnnnnnnnnnnnnnnnnnnnnnnnnnnnnnnnnnnnnnnnnnnnnnnnnnnnnnnnnnnnnnnnnnnnnnnnnnnnnnnnnnnnnnnnnnnnnnnnnnnnnnnnnnnnnnnnnnnnnnnnnnnnnnnnnnnnnnnnnnnnnnnnnnnnnnnnnnnnnnnnnnnnnnnnnnnnnnnnnnnnnnnnnnnnnnnnnnnnnnnnnnnnnnnnnnnnnnnnnnnnnnnnnnnnnnnnnnnnnnnnnnnnnnnnnnnnnnnnnnnnnnnnnnnnnnnnnnnnnnnnnnnnnnnnnnnnnnnnnnnnnnnnnnnnnnnnnnnnnnnnnnnnnnnnnnnnnnnnnnnnnnnnnnnnnnnnnnnnnnnnnnnnnnnnnnnnnnnnnnnnnnnnnnnnnnnnnnnnnnnnnnnnnnnnnnnnnnnnnnnnnnnnnnnnnnnnnnnnnnnnnnnnnnnnnnnnnnnnnnnnnnnnnnnnnnnnnnnnnnnnnnnnnnnnnnnnnnnnnnnnnnnnnnnnnnnnnnnnnnnnnnnnnnnnnnnnnnnnnnnnnnnnnnnnnnnnnnnnnnnnnnnnnnnnnnnnnnnnnnnnnnnnnnnnnnnnnnnnnnnnnnnnnnnnnnnnnnnnnnnnnnnnnnnnnnnnnnnnnnnnnnnnnnnnnnnnnnnnnnnnnnnnnnnnnnnnnnnnnnnnnnnnnnnnnnnnnnnnnnnnnnnnnnnnnnnnnnnnnnnnnnnnnnnnnnnnnnnnnnnnnnnnnnnnnnnnnnnnnnnnnnnnnnnnnnnnnnnnnnnnnnnnnnnnnnnnnnnnnnnnnnnnnnnnnnnnnnnnnnnnnnnnnnnnnnnnnnnnnnnnnnnnnnnnnnnnnnnnnnnnnnnnnnnnnnnnnnnnnnnnnnnnnnnnnnnnnnnnnnnnnnnnnnnnnnnnnnnnnnnnnnnnnnnnnnnnnnnnnnnnnnnnnnnnnnnnnnnnnnnnnnnnnnnnnnnnnnnnnnnnnnnnnnnnnnnnnnnnnnnnnnnnnnnnnnnnnnnnnnnnnnnnnnnnnnnnnnnnnnnnnnnnnnnnnnnnnnnnnnnnnnnnnnnnnnnnnnnnnnnnnnnnnnnnnnnnnnnnnnnnnnnnnnnnnnnnnnnnnnnnnnnnnnnnnnnnnnnnnnnnnnnnnnnnnnnnnnnnnnnnnnnnnnnnnnnnnnnnnnnnnnnnnnnnnnnnnnnnnnnnnnnnnnnnnnnnnnnnnnnnnnnnnnnnnnnnnnnnnnnnnnnnnnnnnnnnnnnnnnnnnnnnnnnnnnnnnnnnnnnnnnnnnnnnnnnnnnnnnnnnnnnnnnnnnnnnnnnnnnnnnnnnnnnnnnnnnnnnnnnnnnnnnnnnnnnnnnnnnnnnnnnnnnnnnnnnnnnnnnnnnnnnnnnnnnnnnnnnnnnnnnnnnnnnnnnnnnnnnnnnnnnnnnnnnnnnnnnnnnnnnnnnnnnnnnnnnnnnnnnnnnnnnnnnnnnnnnnnnnnnnnnnnnnnnnnnnnnnnnnnnnnnnnnnnnnnnnnnnnnnnnnnnnnnnnnnnnnnnnnnnnnnnnnnnnnnnnnnnnnnnnnnnnnnnnnnnnnnnnnnnnnnnnnnnnnnnnnnnnnnnnnnnnnnnnnnnnnnnnnnnnnnnnnnnnnnnnnnnnnnnnnnnnnnnnnnnnnnnnnnnnnnnnnnnnnnnnnnnnnnnnnnnnnnnnnnnnnnnnnnnnnnnnnnnnnnnnnnnnnnnnnnnnnnnnnnnnnnnnnnnnnnnnnnnnnnnnnnnnnnnnnnnnnnnnnnnnnnnnnnnnnnnnnnnnnnnnnnnnnnnnnnnnnnnnnnnnnnnnnnnnnnnnnnnnnnnnnnnnnnnnnnnnnnnnnnnnnnnnnnnnnnnnnnnnnnnnnnnnnnnnnnnnnnnnnnnnnnnnnnnnnnnnnnnnnnnnnnnnnnnnnnnnnnnnnnnnnnnnnnnnnnnnnnnnnnnnnnnnnnnnnnnnnnnnnnnnnnnnnnnnnnnnnnnnnnnnnnnnnnnnnnnnnnnnnnnnnnnnnnnnnnnnnnnnnnnnnnnnnnnnnnnnnnnnnnnnnnnnnnnnnnnnnnnnnnnnnnnnnnnnnnnnnnnnnnnnnnnnnnnnnnnnnnnnnnnnnnnnnnnnnnnnnnnnnnnnnnnnnnnnnnnnnnnnnnnnnnnnnnnnnnnnnnnnnnnnnnnnnnnnnnnnnnnnnnnnnnnnnnnnnnnnnnnnnnnnnnnnnnnnnnnnnnnnnnnnnnnnnnnnnnnnnnnnnnnnnnnnnnnnnnnnnnnnnnnnnnnnnnnnnnnnnnnnnnnnnnnnnnnnnnnnnnnnnnnnnnnnnnnnnnnnnnnnnnnnnnnnnnnnnnnnnnnnnnnnnnnnnnnnnnnnnnnnnnnnnnnnnnnnnnnnnnnnnnnnnnnnnnnnnnnnnnnnnnnnnnnnnnnnnnnnnnnnnnnnnnnnnnnnnnnnnnnnnnnnnnnnnnnnnnnnnnnnnnnnnnnnnnnnnnnnnnnnnnnnnnnnnnnnnnnnnnnnnnnnnnnnnnnnnnnnnnnnnnnnnnnnnnnnnnnnnnnnnnnnnnnnnnnnnnnnnnnnnnnnnnnnnnnnnnnnnnnnnnnnnnnnnnnnnnnnnnnnnnnnnnnnnnnnnnnnnnnnnnnnnnnnnnnnnnnnnnnnnnnnnnnnnnnnnnnnnnnnnnnnnnnnnnnnnnnnnnnnnnnnnnnnnnnnnnnnnnnnnnnnnnnnnnnnnnnnnnnnnnnnnnnnnnnnnnnnnnnnnnnnnnnnnnnnnnnnnnnnnnnnnnnnnnnnnnnnnnnnnnnnnnnnnnnnnnnnnnnnnnnnnnnnnnnnnnnnnnnnnnnnnnnnnnnnnnnnnnnnnnnnnnnnnnnnnnnnnnnnnnnnnnnnnnnnnnnnnnnnnnnnnnnnnnnnnnnnnnnnnnnnnnnnnnnnnnnnnnnnnnnnnnnnnnnnnnnnnnnnnnnnnnnnnnnnnnnnnnnnnnnnnnnnnnnnnnnnnnnnnnnnnnnnnnnnnnnnnnnnnnnnnnnnnnnnnnnnnnnnnnnnnnnnnnnnnnnnnnnnnnnnnnnnnnnnnnnnnnnnnnnnnnnnnnnnnnnnnnnnnnnnnnnnnnnnnnnnnnnnnnnnnnnnnnnnnnnnnnnnnnnnnnnnnnnnnnnnnnnnnnnnnnnnnnnnnnnnnnnnnnnnnnnnnnnnnnnnnnnnnnnnnnnnnnnnnnnnnnnnnnnnnnnnnnnnnnnnnnnnnnnnnnnnnnnnnnnnnnnnnnnnnnnnnnnnnnnnnnnnnnnnnnnnnnnnnnnnnnnnnnnnnnnnnnnnnnnnnnnnnnnnnnnnnnnnnnnnnnnnnnnnnnnnnnnnnnnnnnnnnnnnnnnnnnnnnnnnnnnnnnnnnnnnnnnnnnnnnnnnnnnnnnnnnnnnnnnnnnnnnnnnnnnnnnnnnnnnnnnnnnnnnnnnnnnnnnnnnnnnnnnnnnnnnnnnnnnnnnnnnnnnnnnnnnnnnnnnnnnnnnnnnnnnnnnnnnnnnnnnnnnnnnnnnnnnnnnnnnnnnnnnnnnnnnnnnnnnnnnnnnnnnnnnnnnnnnnnnnnnnnnnnnnnnnnnnnnnnnnnnnnnnnnnnnnnnnnnnnnnnnnnnnnnnnnnnnnnnnnnnnnnnnnnnnnnnnnnnnnnnnnnnnnnnnnnnnnnnnnnnnnnnnnnnnnnnnnnnnnnnnnnnnnnnnnnnnnnnnnnnnnnnnnnnnnnnnnnnnnnnnnnnnnnnnnnnnnnnnnnnnnnnnnnnnnnnnnnnnnnnnnnnnnnnnnnnnnnnnnnnnnnnnnnnnnnnnnnnnnnnnnnnnnnnnnnnnnnnnnnnnnnnnnnnnnnnnnnnnnnnnnnnnnnnnnnnnnnnnnnnnnnnnnnnnnnnnnnnnnnnnnnnnnnnnnnnnnnnnnnnnnnnnnnnnnnnnnnnnnnnnnnnnnnnnnnnnnnnnnnnnnnnnnnnnnnnnnnnnnnnnnnnnnnnnnnnnnnnnnnnnnnnnnnnnnnnnnnnnnnnnnnnnnnnnnnnnnnnnnnnnnnnnnnnnnnnnnnnnnnnnnnnnnnnnnnnnnnnnnnnnnnnnnnnnnnnnnnnnnnnnnnnnnnnnnnnnnnnnnnnnnnnnnnnnnnnnnnnnnnnnnnnnnnnnnnnnnnnnnnnnnnnnnnnnnnnnnnnnnnnnnnnnnnnnnnnnnnnnnnnnnnnnnnnnnnnnnnnnnnnnnnnnnnnnnnnnnnnnnnnnnnnnnnnnnnnnnnnnnnnnnnnnnnnnnnnnnnnnnnnnnnnnnnnnnnnnnnnnnnnnnnnnnnnnnnnnnnnnnnnnnnnnnnnnnnnnnnnnnnnnnnnnnnnnnnnnnnnnnnnnnnnnnnnnnnnnnnnnnnnnnnnnnnnnnnnnnnnnnnnnnnnnnnnnnnnnnnnnnnnnnnnnnnnnnnnnnnnnnnnnnnnnnnnnnnnnnnnnnnnnnnnnnnnnnnnnnnnnnnnnnnnnnnnnnnnnnnnnnnnnnnnnnnnnnnnnnnnnnnnnnnnnnnnnnnnnnnnnnnnnnnnnnnnnnnnnnnnnnnnnnnnnnnnnnnnnnnnnnnnnnnnnnnnnnnnnnnnnnnnnnnnnnnnnnnnnnnnnnnnnnnnnnnnnnnnnnnnnnnnnnnnnnnnnnnnnnnnnnnnnnnnnnnnnnnnnnnnnnnnnnnnnnnnnnnnnnnnnnnnnnnnnnnnnnnnnnnnnnnnnnnnnnnnnnnnnnnnnnnnnnnnnnnnnnnnnnnnnnnnnnnnnnnnnnnnnnnnnnnnnnnnnnnnnnnnnnnnnnnnnnnnnnnnnnnnnnnnnnnnnnnnnnnnnnnnnnnnnnnnnnnnnnnnnnnnnnnnnnnnnnnnnnnnnnnnnnnnnnnnnnnnnnnnnnnnnnnnnnnnnnnnnnnnnnnnnnnnnnnnnnnnnnnnnnnnnnnnnnnnnnnnnnnnnnnnnnnnnnnnnnnnnnnnnnnnnnnnnnnnnnnnnnnnnnnnnnnncacttctgcaatgataggctttgaggtggcctttacaaagttttggttttagttatccctccctgtactttcttttcttggattttaagccactatttctgcaccttaaccctccttgcttctcccaactctttcaatgtgctccactggggattctgtatcagcctctgagactgggaatcacctagatgtggctggctgctctcttgcctcggccactctctagccttacctctttaaacccattgaacattttccagtatgctccacacaaggggaaacttgaaaagaaacatttacttggggaatctgagctggaggcagggatgacaaggtgcaaatgactccaagagtgacggagagatttcctaattccagttgtcagagtcctaccaacaatccgagagaaagacttacttgctgccccaatcaatggaagaaacactttattgaaagaaacaaaaagaggagtggaatcagagatggcactgaggaggagaaatctgcacatgataatgattatcacttgaaccaaggtgaccaagaaggctgagggtggagaacaggccacgggcctctggctacagagtaagggaaccttgatagcgcctgagtggacaatgcagtacgtggtgaggaggaagggcaggttcaggagaaacgcatgcacatggacaggacacatgttggaaatcgtgctgctcattcagctgcagtcctccccacgtagcgcagaccgaatgactgacgtatgactgacgtatgacgaatgactgacgtatgacgtatgaccccgcagaccgaatgactgaggtatagcagatactcatttctcactgtctgggcatctgggaatcctaaaatcaagacaccagggaatcatgagtctagtgaggactgtaggcttttctgtcagcatgctgttgcgttctcacatagcggaggacaaagaagaataaactcattcaatttttttttaatacaagaatgctaatcccattcgggaaggctgaagcctcaagtcgtgattatctcctaatggctcccatccattagtactctataggaggttaaatttcaacatgaattttagggagatacattccaatcacagatggatggaggcagatgagtgagattatagcaagagttttgctccaaacttactgagtatataaaaaccaggtccccccccccccctgccaagagacttcagaaagaggcaaatagattcagagtataatttattggagacttacatatagtaagatagttttgggagacagcaagaagaggtagatgctcatgatctgtgttggaaataggagacttatatacttggcccaacagtgacttcatccaagctagaatgtatctagaatgagttatcttacaacatctaggagatggtatattcctgtcactgatagattcagggtgatcttaatattgcacaaggcacttcaaatgtttgatttacaatgttctgggaaattctccttctctgtatctgtctctttttctgtctctgtctgtctgtctgcccctgccctcccccctccccgtttattaactagaatcatcatgagcaatcatgcagaatccatacgaggatgctctttttcaagtcagggactaatgtgtattagagaagaggggtgtggagagggaaccctgaaagactgaggaaggaaggcagtgtagcattaaagtgataagttagaatacttagatttctggagagtttcttgtggagagatgagataatcttgaaataaaaaatagacaggactgagagaatctctgagttggcctgtattttgcgatctcatcacaagtctgagtctcactagttttacagtgatgaactttcatgagcacgttcagcatcaaatagggaaacaaaaccttcaaaagagcttattgagtatgagtgtgttaagcagcatgtccccatgcattttatgggtgacttgaggtgacatcctctggagaagcctgtagaagtgaccttgtagaacagacttctttcatatgttcttcacaagactcttttgtagcaaaaatccaggagtagattttggtgggaggtggggccatttgaaagctttgaccaatgtgggaacataacaggaagatatgtggccctcagcctgaggttacttcctcttcacatatgtcacagtggttccttcactgggcttattggcaaggagaagaccagagctcctgtgagtatgcactggcatgtgtgctaagttaggtccatcatatctgagagatcattagtgttcatccttaaccgaagccagaacctcagtactgatggaggacatacatgaagtccatgttgcacatgctttttcaatgaattacctctctgcctgttaacaacgtccatcaggtaggcatctgaagtcccattctctctgtagcttcccggaatccaccacctttctccaaacctcatcttttactttgaacccccttcctttattttgtccagcttcagtgatgattctatgaaagctcctaatcacatatttatacgaagtgggccccatacttaattctgagggctgctgctttgtgtcagtcactttcattttatttgtgtctttcttaaatgatgtctatgttgaatccatttctgcatctctcttttccaaactcaaatctactgttcaggaaacaatttttttaaaagaggtatttcaactaagttactaatagtttaccgttatctctctccttttggtaagttttggaaacattgacctgtcatgagaagttagaggatacaaagatttaatattggtgtggactaccgtcttgagataaaatgtcagctagtaagttgataggggcaattctccaactttctgttgatagaagtccctatgtaactttctctagttttgtcctgtgtttggctcttcaacatctttcaaagaggcagttaccagctaaataagtcacaaggtaaactgaagggtcttgccaggttagttatatttgcagtaggctgagctaaaaatctgtgactggatttttataccccatctgggagagcactgaacaccagggaggatctgtttttctttcatttggctttttaagcaaaatgcaaaacagcttttaagtctcaaagaaggctagaaaaagttgaggactggcttctgttcccacattgtgtcattggttcactaaatgtaacctctggctctccaatgcttgtctctacctgacctgtcttttcgggttcttagcactaaaggtttgggaaggactttgtctaactcaaacttcttattcagagatcccttgccttgttcttaatcttggttgtaagttagattttacaatctttgaagttcctgctctgtatttaccccagagtctgggtaatttcatccccatgaaaatattgctatctgggcaaaagtattacttttgttttgtttgtgtttaatggctttccccatgggggaaaaacactactggctcttatatagtctttgaacttttaaaaatgagtggcagaaaaatgttttctaaaatatgtgaacccccattatagaagaaatagtgactttcttctctctcttttcattctcctcacatcaaatctattatgtataggcccttagacatggctgtactgatatatccttcttcagttgaggctagaaactcactctaatggattcccataggtcgtaagtgttctgtcttggtatataatcttacatatctcacccattcattgtattcattttaacttatcaaaatgtgtgtaaagcagaagtcattgctgcttaaagtactaattaattcaagtattgactagtgtgttcattttcattaggatcttaaaccagtctctctctctctatacacacacacacacacacacacacacacaccaagcaaacaagaacaacaacaattttaaaaaagtccatttaacttgctgcaggtagtgggacagtcaagtacatgagtttaactgaaaagtttttctctggaggaagacactgaatcaatataaactatctttagtaaagagcctggctttttcctggaagatcctaagaaatgatggacaagaccagcactactgcaccatgcttctcttacagcttggcttttaaaagctctattttgcttgaacactcactttgtctctgagtcaagagtgcttcaacaaaatctgctttcctgggggcaaaaccaatcttgcccagaaagggagttgctgctgaacactgacaaaagatattttttccctccagcagaaattgctcaaatggcttgagaaagaaacacaatatgatgtttatctgtgtttacagatgtttaagcagtgcccccttcgcagggtcatgtgactacaaacagcatcgtggtaattatatttgctgctgcaaagaacagatgtgtaaattggtggtttcttgagggggaggggggaaatgatgccaagtcctctttccagaaatggacacagtgcagtgcagctgtgacacacagcctggaattctcttcggttctggaatgtgcccacagtcagagactatgaaaattcagtgagacgtccagcaggaaagtctggggagacctaggaaatgattctagtgatgtgatgcatttcttattcatcagattttaactttctctgctgatgttagacaaacctcaatattcaaaggagacggcaaccggtttttttgtttctagagtttttcaggcaagaagtaggctctacactgagagcaggatgagaagtcacgcaagccccacggacctttgagcaagtgcactttagatgtcaacaagacttcagcgaggtctgattgcatcagagtaatcaaacttttggcctgtgcacagcagataattttttttaatataccactgaaaagtctggcagggatcctaaaacctggagtctcgtagctcatgtcatatacctctaacaccttggagaaaataaatcagatggcagtgttcctactagtgaatttattgtctttgtagcaatttgctctccccaggatgcatgtcaacaatgaatatatagcagtcaagatcatcctgaatgtcaaagaaacatcattcaactcgcggtagtaaaacaattgactaaaaaatgtctgttaccacagattacatcaccagcatcctcacctccttcactctgcatacatttcattttggtcttaaactatggcgagcagtgtgtcggggatgttgcactaggatcctgcatttgcctgaagggtgaaacgtaccctggatggggggggggcgctatctgtatttctccacgtactgaaactttgtagaagactaataggtagcctataacttagtagatttgatgaaacagtgagagttaatttgcatttatattgggtattatagtcaaggaaattatgcaacaggagcttttctcctggggcaggaagcataatctgctctgttcaggccacactcttcagctttccttagcccatcgtcaccacacagaagcaccaaaccaagtctccatgattgaaatgtagcagaggaaccagcctgtctgctaatctgtatctttcaggcccagaatggaaggataataaattgagacttgcctaatgccttaggctacagcatgcctttgacactaatgatctaattcagttatctactttgtcccaaatttagctttctcattcaatgtggccctgggaactcagggggggctgggagaacactcggaggtaaagaggcctaaagagccccagctctatcactgcctctgtaagcttgtgtccctagctgtgagataacatggcattatgatatttttaattggaatttagagtaaggattattggccattttgtggaaatagctacttctgggtgtccattggaaacaatggaataaaatagaaaattcttacttgatcagtagagccattttcaatgtattcaaggaacatattttcagacagaagtgtggttcaggttgcagtcagtcctcagtgtaatctatagatcactgactgcaatcaatcaaaaaacgcatctgggtacgtctgagcagactcctgccctcagcagccttcgaggtagagtgaatgagtctttttcttataattatattagttggcagacatgtacaatgaaagttacaaacccctgatgtagatggaagagcatttttgttgctcatttgaagctgggttggaagaaaaatcatttaatctatttaaacttgaactttgtaacagtgcagtcttccatttcccaggaaacaaaggtatgttagtagaaacggccttgcggtgaacagcttcttagaaaagacaattgttaaccttaaaacttaaaacacctcccacactataataacacaagtgaaaatttcttcatctgtctgcaaaacttcaagttcatccaaaatggagctggagagctgtctatctcttatggaaacttataccaatcaggtttaataaacctgattatttacaggatcatgggtaccgtaccaatggctatatcaccaaagaatctctctctctctctctctctctctctcatccaccattaattcatataaatcatcagttagagatgtgctcccataagtccttcctctgatcgtgacagggtcttcatgtgtctgatcttataccaggaatcatagctacagagcattctagattgcaaaagccaggtcctgccacaagacagaagcctttatttacatctgatttcattggaaaaggggtgtatgcataaaaccacacacacgcacacacacacacacacacacacagacacacacacacacactcacactcacacacctcctctctgagctatgtgttatgttagccaattcaacagtagtgagaaggaaggttacaaacctactgtttacctgaaacctttgtgtcagaattcgattctcaagagcaacgttatgggagagagggtagctaaatggcgtttcaagggaaccttcttgctgcctggttaaatggtagaaggaactgttgggtgaggagactggatagagagaagagtcaaattaataggcacctgagaaagagccacattgaattgtaagtgcagacgaggagagttgcttaggcataaggatacagttgtcatatggtcatcttcaggcttaagaaagaaacgttaggtaaagggcttttcagctaccagcacttactactgagtgctgtctgatccagaacagccagggtactgggcagttccctgtgaggaagagagaagaatctagatcacttagtgggctcagtcactacatccataagtgtccaaagagtgttccctaaggcccacagaccatcctggcatcgaacccctccctttttctcccatcatgcaatgtatcagtcttcaggctttccttcctgtatttaccttcgaagttgtgcctttgaatgttatctgggttaggtgactgctctcagtcagttattaccaaattcttcactcctatcacagtttatgtgtttcgtatgttttgatcttttttttttcttttcaataactcggcctaataacaaagacacttttctagaggtacagaagtaacaggcagcactgagcttagaaaaactgtggacattctatggacactcagatgagaaattaattaaacacactgcctgatggtttggattcaggggcaccctgaagctcaccctcttacccttgatatacaaaatctgtataaaataaggaactgacaagaccccagactttggggagcagaggagggggctgaaactaacttgctttttccctaagcaacgctgattttgactggcctctctgcagtttccgctctttcttgcacacactgatttttggcttcctttctgtgctttagttgatctgccctactccctacattttgacatctgtttcctttggtcatccctactttgcacttcattctctgtcttccgcgatggaactggctccttccgggtgatctcatcgctttgtttctcagcctcagcatgctcctctctctctctctctctctctctctctctctctctctctctctctctctctctgtctgtctctgtcttgctgtctttcagagcccccacctctcagcttgccggggtggggagtggtggtggggctgagggcgtggcttgagaccccagatcctaaggatgccagggcggagcacagactgatcattcggatgccccacccgcacagccctagtgttcgcccagaggtctgcaactagtggagcccctcctccaattcagcaagcatctagtcttaatgctctctcagagcgctagggaattcttgtttgggaggtaattgcttcttgcataggcttgttttgaagaacaaaagctcgagcctctgtcccagacctctcagaagaacagtgagggccaatgggctgggctcctttcttagtcttcttaaatctcttgctcctgctgcttatgcagagacctgggtgggttacacagcaggtgacaaagaatgggaaaagctaactgggtcaattggaagtctgtctccatttttttttccctgacttggaggctgctaagggcacattagcatcccttaggctatgttcactgtttccttcagcgggacaaggggagaccatagcaaagggctggatggtttctttacctcagcagaatcagacatttgcaaactaagtaagaatcatggaagatgttacaaaagagaaagccagctaaggcaaaaccagggactccatttgaaaacaatgacccttcggaattattagtattcatttacatttatttaggtttcttgagtaactgcacacagtcctctctctctctctctctctctctctctctctctctctctctctctctctctctctctctctctctctctctctctccaaacttgggaggacagtaaatgaagcaggtggaaagaagtgaaattaccatccatgtggcgaaatttagatactgtgagatttcctcttggcttggaaacacctggcaccagggttgttcattcatccagtaacatgaatgaatctcggagactggcagtgggatagggtggtgtcgggggctgtacgtgacatcacactcacaaatggaagaatagcgagaagcctccagctagcttccatgggtccctgcctaggaggtggcagctgtgcaaggacccaggatcacacagaaactactatgtggaaagatgacactgggcaggccagcacacgtgcatgcgcgcacatacacacacacacacaatgtatatatatatatatatatatatatatacacatacatacatatacacacacatatataatgtgtatatgtgtatatatttgcatatcttcgttatttttagccatctgactttcttcctccaaccagcttgtgatcatattattcacatatactcacagtgtgactttttaaatggtaacttaggtattcctttagaatcctttcctcccttatcacagaggctttggggaagctgtgactttctgctgactaatgaatggtgtagtgccagcctttaggaagagctggtatcagcatgttatcgactggcgtttacaggatgttagtatctatttgacaatgaaatgattcatttgtcaattcataggtactatatatagtaaaggcaccctccactgtaaggaaccaagcgtaggaccatagctgccagcgggatttcccttttcagctcggtgatctactggaagtggctatttatgataatgcatataaacaattaagcatatgtaattatgataaaatcagtgacagtagaggccaaagtccagggaggagaccccatccatactagattctgcaattagattacaaatctcagatgcttcattttctagggaaacagaaaatcagaaaaaatgcacataatcatctgctggtagagctttgatgcttggggtgtttgattcatcagataggtagactgaatccactgaagtataaggactttcacaggtctcaggcaggttgggagggtcaaatagggagccctggacacctgacaactcttctcttcttcctcctcttcttcttccccctcctcctttccctcctcctccccctcctccttactctcctctccctcctcttctaccttcttcttcctcctcccccttcctccccctcctcctctttcttcttctcctcttcccttcctcccctcctatattcctcatttctctaaatccaataaacagtcaatccttgaaaacagctttccatgtagagtgctattcagaaggaactgtggatttcgcagaacaggcggtgtgggtgatatggccagcactgttcacattaatgttcctagttttgttaagatatagatgcagtaaacctgggccaggcaagtctgcactgagagtggccattgccagctgttcccagtagtgcagaggaggctggtctttctggccctgtagcctgcctgcctttcctctttgctttttctttgcacagatgcagcagccctgggagatttaaggacccttttatggtcctgttgccaggtcacagctcgatttgctagtatggatgccattcactgcctgtcctcagccaggctggagattgttagaagtcatctctagaggctggtgtcttgagctaaagggtgtgatcttttatctagtgacttagcaccatttaacttggttccacaaacctttcacacataaacaatttgctcagctctggtggcaaaaggcaagtctttttctatggcacgtgggtcctccagctgtcgctcatttcttccctccagggagtgcagctgctgtagtgctagctggcaggcctggcccttcagctggggctctgccagtgtttctgtgtgtctccccaccattcactcttctttctctgtaattcctcgctttgcgctgttttatttactccatgtccaggggccgttgtacacgatgtaaggaataactgggcaaaggctctcctaaggcaggcagacttcagtgttgcccatttctcagttctctgaagcttgcttacctccaaagggcctttgccatagccctgtaccttgtcccgggggctcactttcagtgcctcttattataacatactctcaggatataagtcccaaatcataatctgagtgtgaaagtcagaagggctgaaccccagagtcaggcatctgaggcagccaaggcccagctcttccactcattaaatatagaacccccctaagcattaattttctcatttgtaaaatagcattacttaactcatatattataattatagtgacgtctacttcctacatgtaagaatttccatgtaataccttaactcagggcctgacaaagtgatcaatgaatgcaaacttttgttatccacatcattattatgacagtttttcttcccttcaagaatttataggatagtagagtataggggaggaaagtatgtgaatagctttaacacaaaacaaatacagctagagatgctatgggaatttgagataaaattaatagcctattccagaagttggcaaactggtgtgcaaccccacaacagcttttacatttttaaagggttgaaagccaccttaatggataaaaatgtgttgtggctccttggtattatctagaatgcgcacattcccaattcataaataactttattagaatacaaacatgttcattttttaggcattgttcatggaccacgtcacagatagagaccatatggttcagaagatttttgaaaatttatatattttttaaatttgtaatttttttgcagaataaatgtgctaattactggccattatcactgcagtaaagcaagaaagaccttctgccaaagagctgggggttggggtggctcacgagggatgtgaagatctttggtggacatggaagatagaggtgtcaagcagcattgtcagtgagcacacagaccttccctagacttgggcatatgaggtgtgtgagggtttctctgactgaagttcagctctcacttagaagactaggttgaaccaaattccaaagcaatgtatatcttcttaacttgataaacaatgtacatacccccaaaaaaattgtgtgagagcaggggagaagcatactatgctatgctaaagacactgctctgttttattctagtttaacttaatatgatgagtggaagacaaactatgtaagagagattcttaggttgagttttacattgagtattacagtgacagcacccggggtcagttttaacacttaaaatatggaaacagtgtgcgcaggcataggttcagctatttgatcagtggaaaaccaacaacaattaagaatcttcattcagaagattcacttccacttccaactaggcccattagttttctgattccacacagtgattcaaaacgtgtgctctatgttttggggtcacctctgtttcaggtcaccgctactctgttgagactgtctgtcagaagctcagagcaactttggatcactaggtgccctgtctgtgttcaatttggggaaattgtgaacaattacttaatcgcaggcagagttactgaagacccctggggatctttaatcactcctatctgttctcatcctcagacacacagacagaagaatctatctcatgatgaaaagatcagaatttgaagaggagtaatagcatcatatctcatggaacaaagatattaagaaagactcctgactttccaagagctcacttccttgctctcttgaactcctttctttcaagacagggggtttccctgtgtaatcctgactgcaccagaactctatctatagaccaggctggccttgaactcacagaaatctgcctgcctttgccttcccagtgctgggattaaaggcaagggcctttaataacttttagtagaaaaccaacaacaattaagaatcttcattcagaagattcacttccacttccaactaggcccattagttttctgattctacacaatgattcaaaacgtgttctctatgttttggggccacctatataacttttcttaacatacatatcccagaaccagacaatgtctccctgtcttacctggtttagctggattgttttacttaaagaatgagctataaaaatctttgagagagccaccagaattaattcagatgttgtacattttccttaagaatttcaaaagagataggaggtgatcccttcttcctaggctggtggctttgaagaatgaagcattttcttgttgtaggaccacaaagtaggtgaggtaataatggtttttcaccacaatgaacagccactaaaacagataaagcatccattccctcaaggagctagatgacataatatgataactttgaggatgtaatctgagctggtttcatattcactatctgcctccctacaattgtgaggacataagaaagagttggtgcaagggaaaagctatatttaattcagaaacttggactggaattaaatactcagactcaggactacatcatagaacccatccttctctaccttttctcctataagaattcacaatgaaactctatttcatctgtttactttcctcatttaattaaatagccataatttctgatcttagtcccaatccctccttcccttttctctcagaattgcttcctctgccctctgataatttcttttctctgctttcaaaattaataagaaagctagtctcagagctgctttcaacacttcaagtatgaatcttcccccatcaaattcttcatgaggaaaacgagtcacatcatcagtggggtgatgaggtcatgacaccacagcccccgctttgaaaaataccatttccgttttctttctcttggagcaagatttttaaagggggggatgaaactggggtgacagctctgatgactcttttagaaactgcccagcattgccagacaccagcttcgacaaagctctattctgaactgtactgcccccccccccccgtgtctatttttgactttgcctaggaggcttgaggggaaatctgcagagatgagcggcaccttgttttcactttgactacttaacttctttgctttctggagctattccatgtccaggtatcatccaatattttgtttcaaatactaactctactgcttgcttgctacgtgattctgagtatgttagttatgccctatgtcatagtcccttcattgtctgttacaaaatcatattttctattacagcactggtgctagagttacatcagttattgtataaacatacatatatatagtaaatacatttggcacttatatatcaataaataacaaacaaaataaagtgtttagaagaatagttaagacataaaattatgtatcttttgatttgttgttagcattacacatatatatgatcattacccccagtactagttttgatgggggcacatactgtttttaagagcacatagccttgaggcttcttattcactgatccatgaaggaatgaaaagcataaaatatttatcagatagctcacccactttctggtgtctgtgaaataacaaattttactttgtactgtcctgttgcaggtctttcataggtactgtagatctccagacttggagctgatatttaaagtttaattaaagttgatatttaaagtttaaaatactgcacaatgagtcacataccaattcaaatcatcttttccttttcaaaatgggatttttagtttctttttcatccctcaacaaataaatttcataataacatgcactctgatgatagataatatgtactctttctagattaggtatatgacattcaggtattattaatttgcccacaggggtgtgtcgaatgaagtaaaaaaaatctgaaattaaaatgactctttctctcagggaaaaacattcacaaactaatcccccacaaaatgtgtagcatttgcatttataactttatcagctgtagttattaccagtcataaaagcacagagtcgctcttagaaccatctcaggcagttattccaatgtacaagggatataagtctatcccattgtacgtattaaaaaatagcaaaatgggaattttttgtgtggtaacagatgaaggtcatatattttgaaaatgactagatttcatcacttctgctgggcatgcagagatttaggggctgagtaaaattagagaggaaggagagggaagcagttagtgtttgtcaggtgagaaatgaatggagctgcaacttaaccttgacagggtaaacacagctctctcttcccagggacagaaaagaaatgaactgcatcttttggcatttttacacagtttattgcttatacttttaaagatacatagctctacagtataagagagttgaggagtgccctcaacccccatctgtgaatgggaataccagcaagtctagtgataaataacatctaatggccaacccataattatcttattaacaaatcgtatcttagtatcttaatgaggtaaataaccattgctctgagatggggatagtaatgatggtgtcagtgattgtttgtttgtttgtttgtttgtttttgaggcggtgtgtcatgaagcctaggttgaccttcaactcactataaagctgaggttggcctagaactcctgatttccctacctcgaaagtgctgagattataggcatataccaccatgcctggaatgcaagagtgtttataatgagaggaattgtagaaattagccattttgagcatgcacagtgtgtcagggactgtattaaatggcttccatgcatgaactcatttaatcatcacgacacaaaaaaggagttgtgttagtcctccatgtcacctgaggctgacatgcccaaggtggtgagctggtaagacttgggagaacaggatttcagacctgtatttgttactcatggcccctactctaaaataacctagtaatgttgacttcctatgttgtattttaagaagcactggaccacttaggattaagaattgactgtatcatttagaatctgggccatacagctgtctttcgctttccaaatatttagagtatgaatcaggcaacatgatgtactcattgcatggtcatgatgaagacctaattgaagtattacaatatattatcctcttactacacaggaaggggaaatgaggaaaaggtctgctggagagtggcttggtgaacatctccaggatacctagccagctggctgagtttttcaagtttccatactctatgttcagcaacacaaagtagtatgagtcacttactactaaccatcaatagttgtttcccaaggatcaaggatatacttacactattttaactgctgtgggaaggtttcacctctggtgtggtcctgggcatgtctgggctactcacccatttttttcccatatgtattggctgactacatttctccctaacattccagttttcaccagatacattagttgctttcctgtcactctgacaatataccatgaccaagtcaacttacagaagacagggcttcttttaacatacggttccagaagtattaggatctatcatggtggggaagcatgatagcaggtagcaggcatagcagctggaactgaagctgagagatcacaccttcaccagcaagcatagagcaaagcatacaaaaagtgaactagaaatagcgtgagtttatactctcaaagtgatgcactgcctccaacaaggttccacacataagtttccttccccaagcagtgccacctactggggaacacttattcagatgggtgagcctatggagacatttttttttttttcaaaccaccacagcaaaagaaactttatgatccctctgtgattgttctgtcatgttagtcttttgggaggcctggtagggagttatctcttctacctcagtgacccccaaaggaatagcagtctctgagagagagcagagactaattgttcttgccagtaactttgatccttgattcaatcaggtaacccatctccatgtctgccacatccaaatggtttctgtaagagctttgttagtttctatttagcatgtatcataggaaatgactagaatagatatatgccttgccttatgcctaggttcttttaaactctagtttagagggatatatcttattgattctgcagaagtggcaatatgctgcacccttcgttaaggaagagcataagttctctcactaacacactgccaggaattccaggatctctctttgctcacacattccgttgggaaattgctcagtcatgaacgtgtcacagttgccccataacaaataaaggactttcactgggtcttaaattgtaattgaatcaagttatgatagttgctgggaaaggcttaaaagtttcattgcttcttctgatatttggtttcctttcaccttgagaaaaatcttcaaatcaagcaagcacagtgtggaaggatccttctggatctcagatgtgactattctcttctacatcttcccagaaagatgcaaagactttcatgtaaagaactaaaggaggctcattctcctttctcagttggacacatttcagtctatttctggatctttaaccacattcaaagcacatgaagaggccctagtgtaaacgtgtttgatacttgcacaatttttctaaagtgttggaaactaccagttatgatcacagggcgaataaaactttactaaactaagttactaataaaaatagaatgggtcataactgtttgataaatttcacatttacatattaatattttactctcgttattttatgggccacatcaacttcttcatatacatgaccactctcttgtattagagggaacattgtttaccacatctcttgccctttgattatgtttcttaaaaatatctcttgctcgatcaaattgatcatattttaatttactaaatactcagatttttgaattctgttcttctgctgagataaaatattctaacaaaaacaacttaagtttttaaaaaaaggggtggggctatttccacccaaagtacaaaggtaaatctcttatggtagggaagccaagcaccggaagcctgaagcatctgcttgtatcaccgccacagataagagggagaaaggcaaaggcatttgttcggcttattttatcttttatttgcagtcagaccaggaccttcagaaaatgctccatccacctacaggataggtatcttatgccaggtagcttcataaacagaatgcttcacaataatgctcaatggctaaataattactcaggggcattcttgggggcttgtctcctagactccagctactgtcaagttgacaactaacactaacccttcacaactccaccccttgtcaatttgattcccaaacacatcacctttaattcatgcccttccattcccatcttacagtgcaaaaatgcagtcagttgatgagtaaaatatctatagtctttaaaaatcccaatatccttgaaaagtccagtctcatctgagaccaagaacagtctcttaactgtgagtgcctatttaaagaacaaaaatataaattatatagttccatacttgtgacatatactgtctaatagcacagagtaaacagacttgttgcagaatgaaagaatcacagttagaaaaaagaagtggcacacaataatagtttttaaaatatttaaaacaatgctacctagaaaaaaaaaaagagaagaaaagttgaaaaattttagtatatagaagaagatatcatgccaagcttggctttgcttggaggtttaagtgtttccatgataactgtaaaaaccttaaattcactgaggtatcccagaaaaatgaatgttatttttagttctgagccttaggcacccatgagacatattgtatgcatctccttacttgtgtgtgtgcttagcatagacactccgtacgtagtgagaatgttaacatgatgtttcacagagtatcagctacaccaaatgccaagtgttccaagtttacaatgaaatggacttgggcttgggggatgggcacacttggtgaaaggaacttaattaatcacacaatggatgagaaaagatgagtttcctactttttttgtttgtccagattgatccctggttcttctggaattaagtgaccttaattctggttgaaaactagaagcagtggaaattccctgtgacttgggggagattgggtggggtgggggtgagtttatctgggacctccctgattaacaggtcatagtcatgtatctcatgtttggcaccgaggcttttatttaataaccagtgtcttctaggaaagcattgttcacccacataggcgtctgaacatcattttttaaaatgtcatatttatgattaggttacaaagcagtgggcttccataatggtttttcacacatcctctgttgtaattaacgtacttaatcctgtttttcatcttttaatatttgtgttcataatgggactctagctttcttgagtctctggagggtctctcatgcatgttggcctaatctgaaataactgatttgtttattcttagaaggagtagtatttggattgaagaagcacttggcactggtgtccaagtgcagatgtcctgtcgtataagatagtgcctcattcagaaaacccacagtagagtgcagtaaatagcatcttggctctactctgtgctccattcacaactgttaattttacagggttatgatttcatctctgagcagagggctcctggcagggacagatgcgctggtgccccagattgtgctgtgtgtgtcccagtaggaaccgccaagagcagcaggatggcaggaaggagatggtgcttccgatagagaagcagttgtagcctggccctgggaggaggcagaaggaggaggatgggccctttcaaggagatcataatgtatctttccttcggtttagaatcctatgcctgataaactaagagaaaagaaaaagttgcctcaaatcttacagagaatattgtcaatcttgattttagcctcgcatgtatgctattttaaaatgtatctctgtgtatccactagcatgctgacagacctaagtactgacaggtctgtatatctattcaaggaatatcaaataggccatgtcatgattagctggatctgggtcactaggctaggctggtatgacaggtggaaaaacatactgtgtgttgagtctatggcttacttcctagtctagagcaaaaggcaaagagaaagccgaggccagatttggaccaagcttgggacatagtacacaatagacacatattaattttttgagagcaagtctctagactccttattgctataattcacagcacctagaacagggctcacaaatatgagcaaaagttagatgctcaaaatctagtcattgtgcacagccattgtgctcatgatcccaatgaggagggcctctgagactccactcctttctgtgtgtctatgggctgttaacagtccctgagggaggatggtgtcagtttcttcagtggtgtagcctctcctaggctgcctatgctccaggaaataatgtcccacatgcgttcatgcaaatcaatgggtcatacacagaagaagtgaaatcacaaagatggcttgttgggaagaagtgtctgggcaagagaaggcggcggggggggggggggtgcggcagatgacagggtaatgaagggtgtgtgcaagcctgtaaaattcaatacatgaatgaacacagccatcaaagaataaaaatgtaggtgaggaaaggataaaggaagagatagagagaccattaatagctaggcaggataccatggtgagcagcgatgtggtatagtcttgtttgcttgcctattcatttctttccatggctatactttttgttcctacctttcgattgaatttccaaatagaaacaggtcgtgtgtagcacatggaagactgtaaatgctattaccaaagggcaaaatggtttatattctaattttatgtctgcagtaccaggatgctttatttatgataataaaaactaattttaggtttaaatgactttggggctatgattgtgacttagtaaatacaggaaaaatttaagaacaatcaaagcaatttttttctcaccttttaaaactcagtgataatgactactttctatattccaattctgaagtcctggtgtgcttattgatggtggtagaccacacattgagatagttaatagttggtgactagcatcatgaatcatcatattctggcttcctcagtgccctggaattcatttgtattttgcataaaaccctaatgagatttactattgaactatttagcatgcttctttccttgagtatattcagtttctgatcattcttggacgcttaggggagagagatgcataagttgttgcataatatttcttaaatcattacgcttaagagtcctctgaaatcctaagagcccagtatctttgagagctctttcataaaaacctaaggcaaatgtgatttgaattgttgagatgcatctaaaacaaagcctgtttccattggtttgtagaataacactgacttgagaaaggaaatacatacaaagctaattccagtgatttttgtttgttttatttaaagtagggtagtgtgttttattctgtagcctaggctagcctgaaactcactatgtagtccaggttggccttgaatttgcccctaatctccttacttccttttcttgagccctggaattacagggcttctctggcataccccttgaatgcctgggattcttgtgggggtcagaggatttgagtagtgacctaagtctgtaatccctgcacagggaggctgagttggaaggagctaatcctccaggccagggagggtgacacatcaaacctgtatctctaagaggaatgactggtgaagtgtctcttaagattgattcgaaattttctcccccctaccccataaagggcttagcgcataatgaatcacccaagagttatccacccattgagctttcctttttgtccctcttttctccacaaaggttgaaaagaatgatgaggaccaaaagattgaacaagatggtgtcaagccggaagataaggctcataaggctgcgaccaaaattcaggctagcttccgtggacacataacaaggaaaaagctcaaaggcgagaagaagggtgatgcaccagctgctgaggccgaggccaaggagaaggatgatgctcccgttgctgatggtgtggagaagaaggagggagatggctctgctactaccgatgcagccccagccaccagccccaaggctgaggagcccagcaaggcaggagatgcaccttctgaggagaagaagggtgaaggggatgcggccccctccgaggaaaaggccggctcagcggagacagaaagtgctgctaaagctaccactgataactccccgtcctccaaggctgaagatggcccagccaaggaggagcctaaacaagccgatgtgcctgctgctgtcactgatgctgctgccaccacccctgctgcagaggatgctgccaccaaggcagcgcagcctccaacggagactgcagaaagcagccaagctgaggaggagaaaggtgagtaccacagcgtgggtggggccatgggcgggatgcagcagggatgttatgcctacagccagaccacctgcacagtccagagggaactgtctagatagcgtggactacaaatcacaaaagttatggtgaatccccccaaatctacaagcccgagagaaaactcacaaagaattacatggtagctagtactggagaatcagacaattatcttaattggattgatataaacagtcaagcttgataatcccagttaaaagaaaatgtgctgtatgctgatagacttagtttaataagtaattactgagactacatttatttcatggatgggaattagctaatgtgattatttggctctaggaagggcctcccataaatacagccaactctttattgattatctagtgtgtgaattgccagcaacaaaaaatataatctcaaccctcttttccctaccccacagtgtgtttctgggcattctacccaccaccaattggcgagtggtatctgcttatatgtggagaatgtttatatatgtttgttactggagaatgttaactgtgacacaaactggggtcagacacaattaggaaaataagtctgttgatattgccaaaaccaaaacaaaacaaaccaaaccaaaacaaaaaactccataaattatcattttattatcaaagacaccactctctcatatgcataaataattgagagttgactgtgaatatgaaaaggtactggattctcctcagtttggagctataacttggaaattgaagggtttttttttttttttttttttttgttatgannnnnnnnnnnnnnnnnnnnnnnnnnnnnnnnnnnnnnnnnnnnnnnnnnnnnnnnnnnnnnnnnnnnnnnnnnnnnnnnnnnnnnnnnnnnnnnnnnnnnnnnnnnnnnnnnnnnnnnnnnnnnnnnnnnnnnnnnnnnnnnnnnnnnnnnnnnnnnnnnnnnnnnnnnnnnnnnnnnnnnnnnnnnnnnnnnnnnnnnnnnnnnnnnnnnnnnnnnnnnnnnnnnnnnnnnnnnnnnnnnnnnnnnnnnnnnnnnnnnnnnnnnnnnnnnnnnnnnnnnnnnnnnnnnnnnnnnnnnnnnnnnnnnnnnnnnnnnnnnnnnnnnnnnnnnnnnnnnnnnnnnnnnnnnnnnnnnnnnnnnnnnnnnnnnnnnnnnnnnnnnnnnnnnnnnnnnnnnnnnnnnnnnnnnnnnnnnnnnnnnnnnnnnnnnnnnnnnnnnnnnnnnnnnnnnnnnnnnnnnnnnnnnnnnnnnnnnnnnnnnnnnnnnnnnnnnnnnnnnnnnnnnnnnnnnnnnnnnnnnnnnnnnnnnnnnnnnnnnnnnnnnnnnnnnnnnnnnnnnnnnnnnnnnnnnnnnnnnnnnnnnnnnnnnnnnnnnnnnnnnnnnnnnnnnnnnnnnnnnnnnnnnnnnnnnnnnnnnnnnnnnnnnnnnnnnnnnnnnnnnnnnnnnnnnnnnnnnnnnnnnnnnnnnnnnnnnnnnnnnnnnnnnnnnnnnnnnnnnnnnnnnnnnnnnnnnnnnnnnnnnnnnnnnnnnnnnnnnnnnnnnnnnnnnnnnnnnnnnnnnnnnnnnnnnnnnnnnnnnnnnnnnnnnnnnnnnnnnnnnnnnnnnnnnnnnnnnnnnnnnnnnnnnnnnnnnnnnnnnnnnnnnnnnnnnnnnnnnnnnnnnnnnnnnnnnnnnnnnnnnnnnnnnnnnnnnnnnnnnnnnnnnnnnnnnnnnnnnnnnnnnnnnnnnnnnnnnnnnnnnnnnnnnnnnnnnnnnnnnnnnnnnnnnnnnnnnnnnnnnnnnnnnnnnnnnnnnnnnnnnnnnnnnnnnnnnnnnnnnnnnnnnnnnnnnnnnnnnnnnnnnnnnnnnnnnnnnnnnnnnnnnnnnnnnnnnnnnnnnnnnnnnnnnnnnnnnnnnnnnnnnnnnnnnnnnnnnnnnnnnnnnnnnnnnnnnnnnnnnnnnnnnnnnnnnnnnnnnnnnnnnnnnnnnnnnnnnnnnnnnnnnnnnnnnnnnnnnnnnnnnnnnnnnnnnnnnnnnnnnnnnnnnnnnnnnnnnnnnnnnnnnnnnnnnnnnnnnnnnnnnnnnnnnnnnnnnnnnnnnnnnnnnnnnnnnnnnnnnnnnnnnnnnnnnnnnnnnnnnnnnnnnnnnnnnnnnnnnnnnnnnnnnnnnnnnnnnnnnnnnnnnnnnnnnnnnnnnnnnnnnnnnnnnnnnnnnnnnnnnnnnnnnnnnnnnnnnnnnnnnnnnnnnnnnnnnnnnnnnnnnnnnnnnnnnnnnnnnnnnnnnnnnnnnnnnnnnnnnnnnnnnnnnnnnnnnnnnnnnnnnnnnnnnnnnnnnnnnnnnnnnnnnnnnnnnnnnnnnnnnnnnnnnnnnnnnnnnnnnnnnnnnnnnnnnnnnnnnnnnnnnnnnnnnnnnnnnnnnnnnnnnnnnnnnnnnnnnnnnnnnnnnnnnnnnnnnnnnnnnnnnnnnnnnnnnnnnnnnnnnnnnnnnnnnnnnnnnnnnnnnnnnnnnnnnnnnnnnnnnnnnnnnnnnnnnnnnnnnnnnnnnnnnnnnnnnnnnnnnnnnnnnnnnnnnnnnnnnnnnnnnnnnnnnnnnnnnnnnnnnnnnnnnnnnnnnnnnnnnnnnnnnnnnnnnnnnnnnnnnnnnnnnnnnnnnnnnnnnnnnnnnnnnnnnnnnnnnnnnnnnnnnnnnnnnnnnnnnnnnnnnnnnnnnnnnnnnnnnnnnnnnnnnnnnnnnnnnnnnnnnnnnnnnnnnnnnnnnnnnnnnnnnnnnnnnnnnnnnnnnnnnnnnnnnnnnnnnnnnnnnnnnnnnnnnnnnnnnnnnnnnnnnnnnnnnnnnnnnnnnnnnnnnnnnnnnnnnnnnnnnnnnnnnnnnnnnnnnnnnnnnnnnnnnatggtataattttaggtaaattggttttctttcagctttggaatcgataactttcatctctgttagattctgaattttcagcttgtagcttttctggactgaaatctgccagcctggcttgttcagtgtggcgagcacaaattattcagtcatcatgaatctcatggagtcacagagactaaaggtgacaagaagatctatcatatcatatcagttccaaattcccagagcctctgccccaagttcccctccccgcttctcaccaagtttcattctaaccctggttagaataacagtattttcagacagactgcagagcttggaaatggacaactcccatgcttggttggagatgctgaggctgcatggagagataatctagcaatgtacaggataggataagtctaggagataatcgaagaaagtaagattaaaattttcaaatcagtcctgctcattgctttagtaatatgagaaattatttgtaaacgaggaatagattacttaccttgctatttatggtttttgttattggagagtacctctggcgttgatactgatttcttttctcgtttttttctcagctgcccatctacgtatccctgtttctgtttgcacacacacgacagtcagtgtgcctttgacaggctcagtgagtttctgatgcctttgtaggaggatggttcttctctaggaagcagccttttgaagtgcctataggactgtccctctgtcgttgttgaagggagaacttttaagccccctttaaggatattgtccttggtattccatgctgagcaggcagcatgcccactggctttcagtgatggaattctctgcttctgtccctcaccacctctactgctcatggattttcctcaaagacgaccctaaaacatctgctgctatagtgttagcaatgtcacctaagcattctgcctgttgatttggttaaatttcatttgtctgttttaatttaaaaaaaaaatatgctcacatatatgaggtgtgttagggatggtgtggttgccatgtgggtgtagaggacaagggaccgatgggaccactggacagagccagttctctcatccctccatgtggatactggagatcaaattcaggacatcagacttggcatcaggcgactttacacactgagccaccttgccagggctacactgtattgctatagtctcattacatctttcaaactaagattatcaatacggatcaggggaacagggaggtttacatttgttttgcaattctctgctgaaagagaaaaatattaacttattatctttgtacttctctcctctttcacctttccttcctctcctccctttataatttcatatttacttccttctagaatatttagaatagcttctagtgtaataggagtccatgccacaaagagtcaaaagatgtgctcctttgatagacagacaatctgatttgttaaggaaagcatgataaaatccagagagtggcatttaaaataatcccaataataatctcaactgaatcatgcaaataagtatggaatactttaaaacaaaaacaaacaaacaaacaaacaaacactgcttccgtgactcagatgcaatttaacctattatatttaaaaaaccctttgtatcatgtatatatagatagctgttaagagcagatgaacattaatagtttctaaaataattatgtttttcaaaactgaaaaatccagtgtgtgtatacagatttagagaaattatttatgttagagatagacccctccaactctgtagctttcgaaaagacaaaccagtttctctgtgttagagtgttagtatgattgcttggcaggatgcctccgaaaaggtttagatttgaaatgtggcttcaaccacttctcagatttatacacaactcataaaaactgaaattttgagttgttaaagtccataaatgttgtttataaaacatgggaaccctgtcagcttactcagtggaacactgcttaaatatggttgattattaaggttttatggaccacttttatacagatagagtaatcatttttattggttttacttgacaacaatccagtcgcgtttgttaatattttcctttctatttttacagactgaaggcaaagtaaaaaggtattctgcccatacccagtaactgacaaaggggaggtgtcaaactgataaatttctaaagtgttatctttagatagccttgtagtttttaaagctaaaatgtttgatcttgtctcattcctttttctcagtggctgtgctaatctcgtattgttcttttgaagtcccaacgaggaaatttctggggcaggctctgttctacataccgatgaggcagggaggggagagcatgcctgaatgaggagatggaaagtctgtttacaatggtagagagcatttaataggcaatttattaaaacccccaaatccctatgataaatgctaaatggtgagaatcctagtgaaccattgtaacccccctatatcatgtgttagtaccatgtccctctcctctttatgtgagagaaatttgaggttcagagattaaatgagatacttaagtactttttgataactaggaaccatcaaaccagaaagctcaagccttacatgctgaacccttacatacactcagggaggtcctattctggagaaaatgtattcaggaagatgctcaaggacacacgtatcttggctattataagacttctgacttgtgtagttgtatgctccatgatgttgggaattatcagtgatcacccttataaggaggcacccggtagcactcataatcctgttcaattccctctcagtgccatcacttcagaatgatgagaaatgttaaactaagtttgatcctgaagttcttatccaatgggcttcaagtgtctctttgttagaacaaggtaagctacaaagatcagttaaaactgttcagaatagggatattgcaggtatcatcagctataaagatgagaattgcaaatagaagattgaaggtctcttggctgcaggtcacttgcctcacaattaggatgtgcctcttcataaatttggcttttctgtatcagagccttgttagacacctgttttgactgtacccctctctccagcaagtgtgtttataatgaatccactgtcttcataatacctattgttaaagaacaacttcttcttcttcttcttcttcttcttcttcttcttcttcttcttcttcttcttcttcttcttcttcttcttctgcttcttcttcttccccttcctctcctccttctcttcctccttcttctcttcttcctcctccttcttctcttccttcttctccttctcttcctcatcctcctttcttctcttcctcctcctccttcttctttttcttcttctccttctcctcctcctcttcctccttctccattttcttctctccgctttctcctgctcttctcttctttttttcctgctcctcctcctccccatcttcatctttctttcttcccctggaatctactatagaaaggcaactcagcactaagactgtatataaaatttctaaattaaaactattcttctcattacttgtctctgtgtgggtgtatgagagtgcaatgcccgcggatgtatggggatctccctgggcttgagttagtagttgttgtcagctgacaaacttgtgtgctgggaactgaacttaggttctctgcaagagcaatgtgcactttcagccatgaagatagctctgcagcctaacaaaatataaagcatataaagatggaaaattttgtttaggctaattagaggaaccttactaggaggccttgatatgtaagttgcttcatctgtctcaaaggacaatagatatctaatagatatttttaatcatacctgagaggccctacttttcattcatattattacaaaaatgcaaatatttaaattcaagtcatgattcagcagtgggtagttaaaattaacccacagtgggaaagccagttgttgaacatcatctatgctatttctttggctgaagaaggcaggcaatgtagatttagtgaatgagttaggaatgaatggatggatggatggtactgtgcaaggcaaaatcccaagctgatacaggaaactggtttgtaatctccagacttggcccaggccaattcttaggttccttgagtgtgagcttatcttttcataaagcaaaaatgtcggacaagggatcacaaaatcactagtgaaagatcttggtgatggtcatcttatgacacgttcctgatttatatgcacattctaaatagcaaagtgaggtagactctcctttggacggaacacctatggtgtcatggacctttctggtaatttggaaacgggataagaagctctgtagaaagtgttgcttttatttggggccatgtgttctctctgtggtggccagaattcaaagcatctagggcttcctagaccaagggggacattttagaaacatattgcaaactggaggaaaaccagggctgctctgttctgcagcaggtgattaatttcatcccaactccaggagtgacctgtgggtgactcttaccagtgtgtgacacgcacaccccgagaaggaataatctgccaggtttcttggctcagttccttctctgacatgtctaagtagtctttgcagtgtgagctagagtctactgggccttctgctgctccaccgtaggatgaatggtttatgcctgaaccaagagtgctgctgtgacagaggtagggaaacagtcttttccatcctggctgcctattctccttccccacagccctacagacaaaatctgtgtacagtttgggagccctttgagactgtaaaacataagattgtgggtgatcaaataggttcctccatatatgtgaagtgcaacttgttataactctgctgtcttcagcaaaacaaacaacattctcaccgcataaaagtctcttctaacttaaagagcagatcagcccagagtctaagcagattgtctgcatacttctactggtatgactaaagccttcgagaaggagaagcagtgatgagattaaaggtgttttatgtctttccttcctaatcctttaatactgataggattgcttaaggaagccttagagaagaaccccacagctctcgagggggcaggcttattcaccccaggccaacagtggctggacatttggtgatgtcctactctctttacggaatgttgatggtggtctgggtaggaggtcagtagaaatctttaagttacaggtcacttttgaaaaggtgaagagagatgtacactttttaaatggcaagttaaagaaggtttcattttatgtgtgcgtctttgtgtgtgtgtgagaataccatttaataaatgaagaagactgtttcttatccccaaggttaagctggaacttgggttatgtgcctctcactacaagagtcttttttacatacttcacgtgaaggatgagtcagaatgagtgtttatgaagttttgaggtataccaggctagtatttgtctgtattctctatattcattttaggcatacttagtcatggatgcattatgagcacttaagtatatactataatatatgaaaggaaaaggagttgagacagaataaaagaaagcaaggaaaaatgaacaggaaggagatgaacagccaggaaagcactcgctatgtaagcgtgaggattcttgttcagatccttagcacctagtaggaaaacaggcttcgtggcttgtgcctataatcctagtactggtgagggggatacaggagcagccttggagctcactagccagccagccttgccaatgtgagacccagtctcaaaacctcaggtggagaacagcagaggaagacacctgccattgacatctggcctttacaggcacgtgcacacacatgcgcacagacacaaaccctcctcatacgccatgcacaaagaaacccaaggaaggtaaaggagtcatgatgttattagccatagctgtagctacatgctgatgagttggcttcccaaagcacaaaactcaaccttttagaatttccctagttcggttgtctaaatacgcctgttgtagcctatttcaggcaaccaacgtttatcactgcataagcagttgggaaaagatgtcagagagctcccgcataggctcatatcagtgtatttttaacaaggtaattaattttactttggataactctgaagtactacaatagcaattatcaagtctcggtgcttccgtgttggagcacataaagatccatgtgtaaaaccatatgcttatgtatatgtgacatcatgggaacctgctgtaacatttgcgggcatctgttgagcactgtgcacttgttaaagtggttcaggataaaggtaatgcttagaattgcacctaatattaattaggaaagctattgcttacaaatggtctgatagattatcttctgaagtgtgaaatgagtgttgcacaagagcacagcaggtagtggcatgtggtccaagcccagtggcttgcgctaatgtcccagggcccccatggtagaaggagagaaccagccgctgcacactgtcctctgagcctcaagatgcataaggtggcatgtgcgtgctgtcccctgcctcctccagatgaacgtatgtagtcattttaaagtgtgatctgatattacatgttttgaatgaattgtaaggctttttgatttagaggcaaattcagggtccaggctgaactgtgatcgccacgctcattctcccttttcttcgcactaattgtagtgctaggaagaaaatattgagaaaaacaacgtaagagaagaaggaggggcaagacaagtgaatagctttaatttaataataataaattcaatttcacaaattgcgagcctggacaaaagcaaatagcagtagtgtgttgaagattgtaggggagatggagttggttggagaatgttagaagctctctgcttatgtctccgtccctcttctccaagaggataatttttaagctctaaactactcattgaaaacataaatgtaaggagattctttgctactgtctgtttgtgggaccagaaaaattggccacatcctttgatcccaatgctcaccatgagtatggataaccatagtcatgccaatactgtagagtgtgtacattagttacggggtcagcagaaaatgcatctatcttaaagccctactttttaggcattggtctgggtcaccctaaacattgtattgggttagataaggtgaagtttcaacaatgttaaggccatgcaaaatatatttagtaaatattatagaaatactctattttctaaaaccttgtgttaaaatctaaatcagtgcatgactacgttgctggagtcctagagtccaatggagaagcacttcagaggggtaagttttgggaactgtgatgtttggcagagtcaggggtcatgggtcagagttcagggacttcaccagtgtacaagctcctgtgctacccccctgtcctcaactatttcttgatattggtaaaacattgaaattgtaatgaataataactaacaattcctattctgaaggtaagtccattttccaaagaccttggcttttggtatgactaagttcaaccaaaaaattcagaactcattcatttcatggactcacccattgtcttagctagggttttactgctgtgaacagacaccatgaccaaggcaactcttataaggacaacatttaattgggctggcttacaggttcagagattcaatccattatcatcaaggcgggacatggcagcatccaagcaggcatggtgcaggaagagctgaaagttctacatcttcacctgaaggctgctagcagaatactggcttctaggcatctaggataagggtcttaaaccaatgcccacagtgacacacttcaacaaggttatacctcctaatagtaccagtccctgggccacacatatacaaactgtcacaccctttctgctcaaagtgtgtgttttccaaataggttttcttgctagagatactatagaaattgtttatatttcaagaatttgcttatactgtaaatcataagtcattgaactttaggtgattaaacattactagtcaaagcacagtagcatgacaatatggctgccaaggttttaggaaaggcaaactgatgggcaggagtatattttctattccaacttgcaagcaacagaatggtacaaacaaagaatttttttcagatgttatcctacttgataaatttatctacgtaattttttggggggggttgagacagggtttctctgtgtagccctggctgtcctgggactcactttgtagaccaggctggcctccaactcagaaatccacctgcctctgcctcccaagtgctgggattaaaggtgtctaccaccacacccggctctacataattttgaaacattcacaaaatttagatttacagacattgaaatctctgaataggttttaaacattagaaagcaagaaaacccataacctgcgtttctttcccttgtttggccccagcaaatgatagctgtttgcatgtctgcctaaaagatgccccaaagggaaacatttgtgaactatggcgccaagtcctagtcaactccagggactgacatcctaaatatcatattagtgagtcacaacacatgacaaaccccagctgtgtaaaggactagcttcaataattacaggctttagctctgaggtgctttagcgtctgataattgctttttaaacttttacttttgttatgcttttttatgtatttatttgcgtgtgtctgtgtgtctgtgtgtgtctgtgagggccgggaggtaggtaggaggatacactcatggagaacaggagagcctcctctccttgcaccatttgggtcttgagaattgaacttaggctctaagaccaggcagcaaatgcctttaacctactgagcccccttgttgacccaagcttctttggactttcagtagattgttccgaaggccactcatccaaagatccatatttacacttgtccaaatctgtacccttcagaaattcttcaaacacttatcttggaatgaatttgaaacaattccttttgcctacatgaccttccatggtctgacttgtgcttgtctctctgatctgtttcctttgatactcactacccctcttccctcttctgtagtcacacactttctaaatatctctaatgagtctagcttatgtctgttggtggcttttgcacctgctgtctctgggctaggttgcctctgaccgttcaagtctccgtttttttttgaatgtcacttgcagtgagagaacttccctgaccccctgacctttgatctgagtagcaacagacaggcatctgatacgtgactccctaaagaggtcacgacccacaggttgaaaactactagtctagagggcctttttgcctaatgtgagtgtatttacctctctttgctatcttaaatttttctctatcactagacagtcacaacatcctttcccacaatattcatcatcttgctgttgatctatacctaggaggccctcaatagacatctaccaattagctaataacattattctcctccaaggagaggttcgttttcataaagagcttgcagagaaatggatcatttcactttcatgtgaaagcctcaaccacttttttttaaaaaaaatatttttttagctaaagtatctataacacttatagccgattcctcctttaagtgttaaaatcatctgtttcttttccatgacctatttctgaatatcctctctctctctctctcttaaattctttttaaaatttttttattggttattctatttatttacatttcaaatgttgtcccccttcctagtttcccctccaaaaccccactatcccaccccgttccccctacttctatgatggtgctcccccacccacccatccactgtcttaattctttagcatcagatttcaggcaaccctacttcaactaaaagtgaacaactacttgattccaggcagtaagagaaaagaagaggtgagctttaatatcccctgactttaaacttaagctatttccaaacttaacacattggagattccaagtaaagttttagaaacaaatttacctaggatacctcattaaatatcctaccttaggtaggacttggcaggcctggattcaactctaagctattctaaaacttcttgctgggtacctttaatgatacatccaatcccagactaccacaagatatttacaaagtgatgcattttaaatgatgcaaaggactcatcttacagaagaaagtatgctatgaataactagctgttgcatcagtagacagagcactgcagcagctgttgagttaggtaagtgtcctcttcgactgtgacacaggagggagagtacaggtcttggaattgaatttgaagcacagacatggtccctaaggagctctgtcaatagctcagtatgggtttcatcattatgaaatgatctcagagacgaacccaattggcattaaatggtttgcatataaagttcctacaatgtatttccttgaacatatagcaagtgtttaatagaaactgaccaatttttaaaatttttttttaaaatctgaaattattggaaaacattattttgtaccttggtaccaaccccctgactttaaagaggaaattaatgtacaaatatgacttaatttattgtggtcagctagagagagacacataatgatataccgagtctcctgagagtcggaggctattctacttggcctactttggagctcagcaacattaccaagtacttacattatcagtgatgattgagcctggaagttagccaaggccaccaggtagtgagggtaggattaatttaggctgcctgtaattggtccctcagaaactgcaatctagggatttgatagacagagttggaaactcttgagagaaatgggtaatatgctctttctaggtaagtacaagtataatgatttcaacttagatttcaatcttcttaggaaacttagatgtcactttgactgaggcatagcgggtctcacagagtcctttcatctcctggaatggtctgtaacatgttttactgtgtgtcaatatggatgagagtttggtctttcatcagctattcagctgggaccagttttcaaaactgttcagcccactgtactcgaacaatccccaggacgggctgtgcatgtgtgtattctaatgaaaagtgacgtgtcttgtaggatcaccttgaacagtcacataatgagttaggctcatcgtggaggagacaaggtaacccaaggagctcgtttcattgtcatacagataactttcctttgctagcaggtgtgacttacgcaagagctctaggcgttgtaaagaatactggtatataaaagtaaaaagaaaaatgctgttgttcagtgtacaatctggaagcaatgtaaggcctttaaaaaggagcaagcaagcaaacaacaagcaaacaaaacgaactcctggccccagagctatgtgaaagtatgtgtttgactggaaacacagtctaattgcagagagtaagttcagatgtcaccagggtggcaggtatctgaatgaaggaagtgaacttaattaggcaacattgctgtagcaccagggaggggaaggtgactgtgttagaccttaaaatgttcagacctgaagtgattggggctttaaactaaacaatggcagatgcttttgctacattaaaatagtatgacaactgatgtcatagtattttatggattcaaaggtcttagatataagataagaccttatcctatagagataaggccactgcaaagcattacctgctctcgaaatccatttcacaatgtaacattaattttagttcatccactcccatgacttcatgactttggtaaacaatatttctagacttagattttggttacctttaaaaggacttaaaaatacaattaacttcagaaaggcttcaaagtaggaccttgccacagcaaatcgttcctgaaccaattgtgtgctttgctttggattcgtggctggtccgcagacctcaaggtcgggaacagtattactctgttgccctctgctggggaaaaatgggaagttcaccaagaaacaatggcgcccaggccttttcaacgcaaggaatttgggtgacactgaagtccaaagcagccttcaggcacattcatttaatgctgatcacaggcctcccagtcaggtacacttcggcattatgtctgtattccttaagtaaaaggagtaattggatttttttctgcaagagtgtaaagctaaattttaaaagtagttcagaaaaatagtccggctttttccttggcttgagcgctgggggctcctttccagagcaccgtgtgtgcttcatcgtgggtggtgaacatcttgccaccagaataaactagggtggggctccgaagtcatttctaagctctgttcgatttattattattatttttaatggcgaggaaatgtgcattgatactcatgactgatttctcttgtctcaaattatcgagttaatgccttggtgttaaattagattgagagtgttctctttggtgttcctttggttttctgctcagctgactttttttctcctgctagaggtgaaagattctctgtaattaagaaaggggtggggcgggtgctaagagataaagagagagatgagctgtgaattgtcacgtgtgcaaattgatgacaaacttctcaaagaaaacgatgggagccaagtgaggtaagaaaaagggacattacattctaatggtccttttttattattattttaaaggatcaataatatgtacatgatgctctgcctgcggtttccataacaacccgcctcattgaaagacggcaggctccgcaaatctccaattatcagccttccagggcttattaatggagccgaggatcccagtgaagcaggcagctcattgttggcacgtgcctggtgggctggcaagagggtgggagcagagtgaagtggaactgtgtagcgagccagcagccatttgtcccctgtcgcttctggggggtggggggagatgcagccactcaagagacctgagcacatcttctgaagcctcctggggctgtactgatgtggcaggcagctgagggcggagggtgtagactgccctttcagctacataccaaccgtcatcctcctgtagtaaatctacaagaatatagtacttgctccatttgtctattgaagtcccataatttattgaggattcttcacaataacaattgtgactctgttcccaatgctatctatcccaagtcttaattaaaatgtgaaaacaacctaattcgtatctgatcacttcgaatttgtcagtccttggtctgacaatcatctattaggtccttacgaaaagtcattggaagagcaaaggacttagtagagaataccgttaatcttagcactccagaaatagaggtgagtggaactctgagttcaaagccagcctggtctacagggagagtcccaagacagccaggactacccagaaatccagtttcaaaacaaaacaaacaaacaaataaaaacaaagcaaacaaaaacaccagaaaaccagtttttaaaaggagcaagcaaatataacactgatgaaaactatagattatttatgcttttgttctagagtaattgctaaattctgtatatgtagtaacttcctgaagccacagtcactctgtgcttaggctattatttacttttatagatacagaagggagcaacaaaacttcatgtgtgtggatggatcagagtctcagtctctctcctctctataaccctcacattaatacttttattttcctataaaataaagtcagattagaataaaagggaccaactgagctctatagtctaatgtgattaaggaaatggttaccctaatgtttgattaataattgctatctatgttattattggatttccaattgggggaggtttagatataataaaacatatgcaacattagaaatagagtaattgcagtcataaaatgtgtcaggagcattatacagatatcagtttttagtgtaatgctgaagtattagttgataaagacttccgtttgacagaatgtaagatcatctggctttgtagcacagaaatgtctgccttaacattttcaatagtccttttcacacaccaccaccgaaattcagcgtaatcacaaaagaaatcttttggggtcctccaaaaataaagaagtttgagggagtcattaactattcagaatcatgagactgctttgaaacacctgagtattacattaagcagaagaatggaacgtggcccgcctttgcagggactcaatctgcggctgtcacaatgtgctacgagaccagaccagccttggctggatcctcacaaaattgctcaaataatactatttgtgaatttggactctaggacttggaatagaatttgataaccgagtcatcttttccaggataaagtgataggtgcatttactgcttagccatctatgtgcctcacacaccaaacaaccctaccagggggtgtttgtagctgaggaggctgaggtgtagaaaggttacatgaggtgatgaaggcgccacatttaggaagtgacaggttccagattcagacttgtgctctctggctcttgagtatttctttctcaaaagggttgcctatactcagacaccaatttccttatttctccctgtccctgtccctgtccctgtccctgtccctgtccctgtcctnnnnnnnnnnnnnnnnnnnnnnnnnnnnnnnnnnnnnnnnnnnnnnnnnnnnnnnnnnnnnnnnnnnnnnnnnnnnnnnnnnnnnnnnnnnnnnnnnnnnnnnnnnnnnnnnnnnnnnnnnnnnnnnnnnnnnnnnnnnnnnnnnnnnnnnnnnnnnnnncctccctccctccgtccctccatctctccctccctctttcttttaattcctaatgaccatatccatcttcccagcttcaatttaaagaattttgtccaagggctggagagatggctcagtggttaagagcactgactgctctttcagaggtcctgagttcaattcccggcaaccacatagtagccccatggtaatgggacctggtgccctcttctggtatatctgaaggcagtgatggcatactcatatacataaaatgaataatttttttttaaagaatcttgtccaaaatcacagatttcttccatagtgggaaatgcaatagtcagtttggagttttcagctttgcctagcatttgatggttaacctgtcagttcctactgtacttggaaatactttcaccactggtctttgattatgtcttagtttcctttctgctgctgtgatagaatgactaaaagtcacttagagaatgagaaggtttagttcatcttacaaactgcagttcatcattgggtccaaaattgggggaatcagagacttggaggcaggaactgaagccgagaccataaaggagcatggctttctcctaggctcacatctgggtacctttctcataccttccttatatctcctgtctgcccaggggtggaactggccatgctgggtcctcctgcatcaagcaacactcaagaaaatactgtacagatatggctagagctatttcttcaattgaggttccctcctctcagaagtctctgctttgtgccaatgctaacaaaactcacaggcacatagtacgttacctagtcttatcccttaaccctggattcaatcattttctttcttcttacttctaaacttagtgtcacctcaaagtttggttctttgatttcttactttccgtccaatgtttgcctttgatgaccaactgtgttggttactcttacatggctgtaatcaaaacatgtaataaaaacatccacagagaggaaaggctattgtttcaggggtgtcaatccatagctccttggccccaggggcctaggcaaaacattatgagaatgacagcatgtgatgggggagtttcttcatggtacacagaaggcagagtcctaagaagatagagcaagatttagctgccaaggacatggactcacaggtacctcttctatccatgatggaggctgaaatacacggtcttgaccagttattcactgctcctatctgttcatgactgcaatgactgtgtatatggaagcgtttcatgacactcctatattccagcttttacacactttctacccacttctccataatgttttctgagctcatgggatggtgtagacatctattataagattgaactacacttaaagctgtatcatattatagatttaatgatttatttgcaatataaggttcatgaagacaaggtattcttttgttttagtactgtgttgtacactgctgtatccctagaaagtagaacatggagcaagattatagcaggcatttgtttcatttcatgactaaaggcgtcatctacgtggcaatatggcaggcatttcttttggttgttatcatttaaaggaaaacaaagtagccagacttgttctcaaagatatcacctaggtggcaaaggagacatgctcacttttacttggtgtgtttcgtccctttttaccacgcaggtgcttcttctctttgcctggatagatttccccccatcttcctttgcttttgtagactctttgataattcagatcattacccatgcaggtatggcaccaaagcgctggatcttgtttcacagtctctctctctctctgtgcatggaggagcagtcataggtcaggcacattgcctcatcctcctaagacaaaggatacataaagggcaggcagcaagtttcaccaatccaaaggtttgggcttgaatgtaaaatgtcctatacagtgcatgtgtttaaatagttggtcccaacctggtgaaaggttgtgggatctttaggaggggtagactttccagatgtggttcatggggcaatggagcaatggagcgtgagattttaatgctcatctccatttccccattgactctctgcttcttgattatggacacagggtgacccggccccctcacaattctgcccccacgtcttcatcaatgtggtggactcttatcatttcaggctgtaagccagaacaaattatttctctcctaacttgcttcttgtcagatgtgtggccacagcagcaagaaaaataagtaaggcatggttttatttcagccattggggattcttcactgactgaaaatagatgtgtaaaactcacatttgcatcggagtgagctctctttctctcatggtgaatcagcaaatcaaagctgtggaagcttttgtgtctatgaagcttctgtggattcaaattttctatgccataaattatgattagctcagcatttacccaacagtggttctgttttagtatattgaatgttcttacatgctgactacatcccaatgtaatttaaatatttagtgaaagggcccattgtatgaaagcctacacaatatatataaacatatgtatatatacatatgatgcttatacatagataaagattaaactaaaaaagcatactgtcatacatatagcagtttgtatgcatgcacacatgtgtgcacacacatgcacacatatgcattcaggacactcagctttgagtgatgtctgttactgtaagaatgatttgagttcacaattcaggtagttttataatggctcagaagttatggcaagacagttccgttcttgacaacgggcgcacatggcctagactattcatatcctgtggaccagtaaagagagggagcagaccaggtaccacaggccagccctcctataattgtcaaaatcttgtctacagtgacctcctattttccaacaaggccccgcctcctgaagattctgcagtttcctaaaatactattaccatccgggaaacaactattccagatggactcctatgagagacattttagattcaacacataagtgttggtcatcatctatagattaagtttaatgttatctattagcgatgcctgattaaaaaacacctgtgagccgggtgtggtggtgcacgcctttaatcccagcactcgggaggcagaggcaggcggatttctgagttcgaggccagcctggtctacaaagtgagttccaggacagccagggctatacagataaactctgtctcgaaaaaccaaaaaaaaaaaacaaaaaaaacaaaaaaaaaaaccacctgtgacctagaaaacagcagtgaactcagtgagtgttcctttagatgtggactgtagttaggaaaggtgcctgtgaaaagacagaacactgaggccaacaatgaacctcgtctgtatgagttaggggtaaactctgatgagcaaggactgtgggtcgcatttatgggtggctgcatttagagagtgaagagatgtagccagggtgtgaattgggacggagagggtgatgggagaggcaaggggtgagagcttcagtgcaacctgaaaatcccaatccaataggaagctgtgacagcagggaccagggcgccagcaagggactggaaagctcccgagtctgtggaccgagactttcccatgacagtagacttcgtgtgaataagagaacaaaataccgttgtgtggttaatagttttgtcctaaactggaaacctatcattccttagtcaattcttggcatagtcaccaccttctcttagtcaaactgctgcctaaccctgacatataatttgggtaagtgggaagaatacaagtgtgtgtgtgtgtgtgtgtgtgtgtgtgtgtgtgtgtgtgtgtgtagagctgtgattaactgtcactgctgagtacttgaaatgtggcagccattcttggggatttcctacccccaagacttgggttgatgcttctccattgagtctgttgactgtggtaagcattggctcactaaagtacttcggcactggcaggaggttgacaggaatataatcactccagctcagctatttgtctttagcaacctgtgtcctgacacctgttgggaacagcagatttatagcttgtcaccatgagtaaggtgtttgagagaaactggaacgggcttaatgttaccctttcacaaaatacttttgttttcccttattgtgtcccatgttattgtaacaccctgtatctattccatctatcccaacccttgtctgcctctccccaccaccaagctcccacccagatctccagagaatcactgctactcaatccatcagccaaagttagtgggttcccatggcaaccaggcagctggtgtctagacactcagagagaagctttgcaattgaactgcaaatctagattctaacacaccctctcctctcccccccacccctttcctcccatttccctttatttacaacaggcattagtgccaacactggctgaggtttccttttgacagaccattaaaggaaggagggggaagagagagcagagctggtgagaaacccaaatgtactgtcttgtcatgtcagttcagtaagaggacaactgagctgacaggctgattgcatttgctcttttttttttttctcacgaaggattttatttaattaaaatattttaaattagaaaacagtgccactagtccaatgggagatataagcatctttaaaagccaataaaagccttttcagggtaaggctacagctgatacacaggggtgaggcagaagttttcactggcagcaggcaatcaatataatttctctttctatgaggctcggggggaattacatgtctttgatattataggaaaatacaagaaagagctttaagtgacacctcatatctataaaagtcaagttgaaatctttatttctcttgaggaaaagaaaagctgtccttaacaaccagggtctattctggtttttagtctttgtcgaattctcctgtgtatataaacattttacaaagcacaaaaattaggcaaaagtactttttataggacaactaggagtgagtctgaacacagtctaagtataaacaatgtccaaatacaaaatggacagctatgtccttagcccggttgcataaacaattaggtttttgtacatgatattcattgaggtgtccagtcataaaactacccatccttgacatgactccaatgtggaacagtgttgggcttccttgcattcatctccacttcaccaaacacaaactcaaagaaataatttctgattcttctgagatgtctctgcatgttttcatggttgtgacctgtcaataatccctgaaactcccagcagtctctggatagagaatgttgatgctccatcaaatttctttgttcccttgaatgaaatgtatgaaaggtattttctcatatatttttattccatactgtgtgtgtgtgtgtgtgtgtgtgtgtgtgtgtgtgtgtgtgtgtgtatcaactgaattttgagattaccttctaaaatcttatttttaaaaaaatcacctaacttagaaaacaaaattagggctgaagaaatagctttgagggtaaagagaaattgaagtcctgaggtcagattttccaaatcaaaccagacatactagtatgtgtctgtaatatctgagctcctgtgacagacgagatgcagaataacagactctccagcaacttgcgtgacaggtagtctggtgtatggagtagcaagtaatgaggaacccagtctcaaaccaagtggcaggcaagagctgacacttgaggctgccctatgacttcatatgcacactgtgaaatgtgtgtgtctgcttcttcacctctctgcctctgtctctgtctctgcctctgtctctgtctctctctttgcttccccctcccctcctccccatctcagaaacacacaaacacaaatattcaaagagaatacaattcattaaactgagttttcctttataacctatcccctttcctagtttcccctccaaaaatctcccattctctccccccttcccctgctcgccaacccacccactcccattcctggtcctggcattctcctatactggggcagagaaccttcctaggcctctcctcccattgatgaccgactaggccatcctctgctacataaacaactagagccacaagttcttttactctttagtagggagttcgtagtgatacttaggctatggggaccagacagacagctgaatctgaacctgttgaagcaaacttaccatttccaaattcagtacattttcatgttgctctagagacaaattacgtcccaagtttggatgaaaaggtttaaagcatgagttggagcaccagtcatttctttttcttttcctttctttctttctttctttctttctttctttctttctttctttctttctttctttctttctttctttctttccttccttccttccttccttccttccttccttccttccttccttctttctttctttctttctttctttctttctttctttctttctttctttctttctttctttctttctttcttcttcttcttttttttaatcatctattagctttaagtgagagttttagctacttgaaagcagaaaggcactctaagatgggattattttaattcagatgttattgtgatctccagcaacctctgcaatcagctgggtgtactgtcacatatccatataagtctcatcaatgaagttagcatatgtctttccagctgtgttctgtctctgactttggaatattcttcctcctagattaaggtagttgagatagcccttctcacaattatctcaatactgaaccaacttgtgtcaaccactagtttggaaaacattccactaactaggctttcagtgagtttatattactccagtccctacatcatttagcgctttctaaaattccagctgagactcatgcccagtcttatactcccacaaagctggaaataacatttcttcataggcatatgatgggagggactctactgtttacttatgggtttccatagtttatttgctaatctatctgaactggccttatcctaattactgtgttccagcattctccactgcttacttactggctgttggactacccccaaaaccatgtacttcggatactttgttcatcttccacccattacctggtttcatgcccaaacagtggctgtgtggctgatctctattccttttaaatcggacattcttgtgcatcaacattatcagtataactgtactgtttaacctcacctttatggcctcagttggggaggatgccagggaaggaagaatgaagagatatgggtccatatatagaaaggtcacaaagatacaagaagggcagattggttatatttatacaaagaatggccaggtaatgttcagtatactttaaaatatggtagtgaaggtagcatgggagttaaggatacagaaaaatatttggccaaagaatctggaatttggccagtgtgacacaaagataaaagttttgtgattaaagaaatcaatatgcttataagattgtttaaagattggaaaatggggaacatgccagtgagatggcacagcagggaaaggcacttgccaccaaacctggtgacagaaattagacttccagaattcacatggggaaagaagagacccgagtcctccacttactctttcaatctccacgtacatatcttggcatgtacatatgtatatatccataataaaaaataaatataattaaaaataggtgtgataggatacttttaatagctcactttaaggtcattagaagagtgagtctttgaaacaagcagcaaagatgatttgcagagttgaatcttagatgataaccatgttatcaatcaaggaaaggaagtctgtctctacaggccagaaaaaaccctaaccaattcataaataaacatacaaaagaaaagtagtgtaagaagaaccaaaatgtgccagtatcctaagagatggtttttagtaggttatagcaattggaattccaccactaggatcatagtatcttggttttctttaaatgtgttataggcaggaatggactggatattgttgaagtgatttacagttggagttgctttgaaaaaaagaggaacttcatgcagttgagcaggatttcttttccaggtgtccagctcatttcaaagggacctacagttctagtcacagctaaggatgatagagacaaggaatgctgacttagaggtttcgagtgtcctgtccaggcttgtcagtagaataggtcaatgcttggcattgttacaggtatacaagggtggcattctggagccatacaagagtcctgattgtgagagcagcaaactatatgaagaggaactttgtggcaagccacttcctggagtacaagaggatagtgggtgctcaggaagccaaataatgggcaagtttcttagctactgctggcttctcagtcacagatctcagataaaggtcaatattcaaaagtaaatccaaacagtcaaaggtccaaaacgaacacagcatggcagcgagggtagttaaggtttagagtttagaaagcaattgttctgttttgttttggtgaactcaaggagggcacaggtaggaaaataggaaaggaagggcaaagaaaagatggtctatttcctcacatgacgtttgtttcttggacatgaaaggaaaaaataggttagtacacacgaccagaaaagagtttgccctggagttttacaaaaggcattggatagaagagagattactgatttatttgttgtatgttcttcgggcagacaggctacataaagattatgtttgtcgatttctgtggaatgtcagggatgatgtactctcagagttgcagaagtggagactgtctatctctggaggtgtcaccgtggatacctgcaccagattgggggtgtgccagggtcttcaattccccttgtaacactaaagagtggctatatatcctgaccaatttctgataatctcaaaagatgtatttaaaaatggataataggagattgtttctatgtagaatacatcctgaagaatggctttattggagtgtaaacactgaataaagaaacagaaaggggtgactttcttcctcatttgtttcatggtttggtttggtttggtttggtttggtttggtttggtttggttttctttcttgttttggcaggacctcattctgtagcccaaactgatcagcaactcctggacatcctcctcattagcctccctagttctggaattacaggtatgagccactatgcccagcttgagggataaattttcaaattgcactttaaataattgacctagtgattctgtcctagataacattcagactccaggaatctttattctttcactgattattctcctaatatccccaaatagccaaagctgtaatcttctgtcactacatataagagactggagattgtgactaaaaagaaaaaaatcgctacaaatactaatattacttttccaatacaattctgattgtgttcccgtgaataacattgattcctaaagcaattcttttactcaaaagcagcaccataatttgacaagccccaggaaaccaaagcacacaatgagtacagaatgaattgtcccagtaagaggtggggattgcatctatttacccacgtgtaagcttataatacaaatgtcttttatgggttttgcttgttacaataatgttttttaaattaacttcaaaattgggttaaaccctcacagttggttttgtaatgttctgctaccactggaatctggagggggtggttgacaaaggaacggtattcatttttatttcctcttttacaggacataaaaatgatctcttatggattcgtagctatgacagcatttgcaataattttaaccacttctggactttgaccattcagcaactcattatttaatttataaaatgtagcctaatccatagttactattcagcctaatgaactcatttagaggtcccgatatttttttccccttctctgtgtaggattttcactttgcctcctacaaactgagcacaacactgaaattttataaagcagtaattctcaatactggctctgtgagcctccagagagcggaagattacttttgatagatcttaaagcaagattatattgaattgtcttgtaggtcacaaaggaaaataggaatggaggtagagaaagatggaagcaatagagatatacagtacatttaggaacacaggggagaggtataaaataaaatcagcattagagtccactcattcctgggatggtgagcgctatggtctcctggatggatccctcctttctgctttgttactgtgactttaggcaaggcacagaacctccatcttccattgttctcccagggaaggaggagctgaaagagatttcatcatccaaaaggctcccgcagctttcactaattacacgaacaatttactgtaattttatgaatcgtcacatgccaagtctgtggtaatatatacagacttaggattttctgtcctgaattatgtagttcagccatttgcattgataaaattagcaagacaactgccaagttgctagtttgctgggtgctgtgtagacacagccataagggaaaattacacaacaaggataaataattgtctgcctaggctcaagttctacccaaacatatcacagtcatgagtcatggcaagggcctagctgagtgtggtctatgggtgcaactctctcatcggttacatctcacctacccaatgggtgtgtccaagcaggacatgcctagatttaatttctgaatctcagtcctggaatcagataaccaaatcatatcatctgatatcagattgtaggatcttggaagccctgaggtgtttttgtttgcttgcttggttttttcttttaaaaaggaatcttgaaattatcaactttgtagtgggtgatgctaattcaatgtatgtgaaaaccctattgaggatcagtgtaggctcctttaaataaaaatcaatatcacgtagaagatagctcattaattttctcaaggtccgatgtgacacaagtcacaggaggaggctttgaggttagttccagctcaaggacttctgggccctgcctacttttgaaatgcatggtgtcttcaggaatagggactaatcttccatctctggaagtcaagtaaggccaatagcctgtgatgtttcaggagtctcctgagtgttaactattgaaaagggggtttctctggaggaggaatagatagaggaaggagaaatgtggggagagaccaggcagacaggagggagggggaaaccgagatttggatgttaaagtgaatgaatgaatgaattaatgaatgaataaacaaacaaataaaatagagagagactgagaaagaaagctgaaaaaagtggaagttatgcttgctgttgaggtttttattagacagactttggctcttggagggagcattgtcaactcagatgggaaaatttcatttgaactattcatgtagatttatatgcagacctatatatttctttaaaggcagattgttattactataattccttaggactttttaaatccatccttacaattattatctcaaaagataaaggaaactacaaaaaagacaaatctctagataaggtctggggtggctcacttcagtgaaccatacaaagtttatacatagttcagtaagagaaaaagattagcaaaaaagaagctaagagagcatatggataaaaatggccaataagcttgcttctcctgttaaacctctcttaagcttattaagtagtaaaccctaataaataatatcaaatacacaatgccaggctggtttgctttggagttttcattttctggttgttggaagaaggtagactttactgtgcctcaaagtttgaggatacggtctgccatggtgggcagtgcacgatatttgtttgtttgtttgtttgttttaatcgtaacttcctccaaaatgcatcagagaaaactgccgaaaatcttttctgggttgaggagaagaaagggaagtgccaatttctgtcaagtttgacaaaagtttctagaagtgtgacttttcggggggctggggcgtcatttgagaagacagtcagagtctgactgtgtccagactctggtgggatttcttatgtgggaagataaagagatgatggagttgttggggcccagaagccactggcttctcaagtctccattctgtccctgggccatcatctattaactaacactcttggtttctcctaccttgcttctgttgactcaggacactttatgatagggggttctctggacattttgcaatggggacattcctttggcatcagtgtgttaccaagcaccagtttggcctctgcacattgagcaaattccttctgtgattttcagctttataaaccctctatttcccaagagtaaatgagccttgaataggaattttcgtcttgtcttcttcctttgtgtctcctgatcccaaatttgtcatcgcagctcccttccctcaagaatcctgttatttaagtcctgcaggttggggcaggagtgttgtgcatgagtgaaaagtatggctgccttggagaagtcctctctgggattctgtcctcagctcaagcccctcctcacataaccacaagacttcctggaaatcaaaaatatttttcataacagagatgcgaaatttcactttgtacgattctttttaaaactttagtaatagattattaaagtatagaattctacaaacatgaccgaatgaaggaagtttctttttcttaaaattgtctatgataacctgaaaattctaaaaaaaaaaaaaaaaaaaatctagaaaaaaatccctattcgctgtgtaacttgtccattgggtgcaagattcactacccaacttgatataagtggcagtttagatcctgcttatttaatatacattcatgttttctacacacagagctaagcaaaccccagacctgccattgccattgaaatcaaccagtatgaagtttcggttggaagtagatttcctttgtatgtaagatgaagatgtagcagaaatgttgtacattcccggtcatgagccttcaattcactcttatcctgccgacctctaacattctgttttgctgacctattatttggccagttcttcatctttggctttaaaatcatttctagactttggccccaacttcaaagcttaaagatttttttcaaagaactctttctctttttttctctctctttctatacacatattatatatatgatataataatataagatatataatatataataatataagatatatatcatgtaatatatgatatatgatataatatatttgctctcttcatatatattatatatcatatatattataaataagatttatacatatattatatatcatatatattatacataagatttatacatatatattatacataagatatataagaaatatagcatcaatgatgatagatagatagatagatagatagatagatagatagatagacagacagacaggtaattagatagtcattctcgaaccaagagccttctagggcacagactttcccttctttttgttagaatacttgaaagttccttgaaagttggatgagttcttactagtgaggaagaggaataagtcaactcatttattatgcatccatgtgacccaaggaaaaacaccctttcattttctttccatgttcagttttcttcatttcagttaatttgttattcttactttattaaaatatgaaaaatgaacacacacacatatatatgtgtatatacacatatatatgtgtgtgtatatatatatatatatatatatatatatatatatatatatatatggagagagagagagagagagttgttttgtgtcaagcttctaaatacaatacttggcgtgtagcaaacattgaacaacattcctttccaaaaccagcagatgatttaagcaagaagtatgttgtgaaggactttaaatcaacacatttagttcttataacaacctcatgagagaggtgccaacatttctgctaactataaggaaaatgaagttacaaaaggttaagtaaagagtgcaaagacacagtcaaatgtcacaggggagttaatgctgtctaattctaggactagctcatagccactactctaggccaattaagaatagttatgcttaaaatatcattctttaaaaatttttcttgtatatcttgataactgttagtgaaattaataactttaaaattaccaaggaaatgttttccatggctatgaactttggtttattaagattcattttgtaacccccatttaaaagttggaatttcactataggtacaaatttttcctgcctaaggttattgaaattgtatttatatttaaaaaggattcatggattttactctatttttaaaattacttttagtattttgctagcatagatattttgcacaattctactgcttggaaacaatacaaacacatgcattttttttcaagcatgtttaagcattgagagtcatcagcttatcacatttaaaaactcctcttttgtggattataaattcatgtaaatatatccctgtgggagcggggggaggaaacaacattagttcatgatcaactgaagactagaaaagacttcacaaatcagcaaatgatacaaaaactacaatttccttatgaaaagaaagagtgaagccgggcggtggtggtacacacctttaatcccagcacttgggaggtagaggcaggtggatttccgagttcaaagccagcctggtctacaaagtgagttccaggacagccagggctacacagagaaaccctgtctcgaaaaaccaaaaaaaaaaaaaaaaaaaaaaaaaaaaagagtgattaattctccctagacaagtttagaactgggaaatatcagttaaacttggtcttgagagttgacaagtacacattcaaatgatttaactttgagtattttctgtatgcattgaataaattacaagtcacaagtagcaaccgttacaatgtatggaagacctctgacaggcacaggtaaatatgcacagatgaagagtatatctaaatgccaaataagaaaaaaaggtaacaatgagaaagattnnnnnnnnnnnnnnnnnnnnnnnnnnnnnnnnnnnnnnnnnnnnnnnnntccatccctccctccctccctccctccattcctccctctctccttcctccctcccagtcccctgtttttctttactttttgctgtggtaagctatttacaatatttacaacatcaaaattagatatatgttactcattctcaaaagaatactgaagtgtgtgtgtgtgtgtgtacacacatgaaactagagtccctggaagtggaaataaaacagtaaaataaaaagaatttttaaggtcataaggcaaactgggccaacatcacagtgatggcttgcagtctacttactgaatagattctgcaatgctgaaagaacagacacaaaacttaggtctttacagcctctgatgaagtctggatgttttcagctgtcttgtcagatgggagctttaacttttagaagtatagataagttcttaggggaacacaggaagccctgaggctgaactttatctgattgccactgaatgacaaacagtatcctagttacctttctgtccctgatatcacaattcacaaaatttctttgctcctagtgtcataaatgcttatctgtatgctgactccccatccttcctcctctcatgtttcacagaactaacgccttagaactagatccagcctccagatcactctggtatattgctaactatagagcgctaacacctttatagaattatatatgactagccattcagtgtgtaacttatcttggaggatagatgcaaaaataagtctcccttgtagttatgctactgtgaaaatactattaagtttggggtttgaatttctactcttagaagttgacttttttattttaatcatgataagaaataaggtagactgattaggaatctagctcaggtagagagcttgctagacactgggtttgagttcacagaaccttgcatacatacatacatacatacatacttacatacatacatacatatacatataaacacacacatatatacacatatacaagaagacatacagtttaataatgtacttttgtgtatttattgcctcctatgctagagatgattggtatctattagacaacttatataagttgtaattgttgctctttctatttgtcagtactgggaggaggcaggacattatcttttgatgattgtgtagactaaatgtatatataaagtttaagaggcttccaaagggttggcaaggtggcaaggtggttaagagcactgactggtcttccaaaggttctgagttcagttcccagcaaccacatggtggctcacaaccatctgtaatataatctgatgccctcttctggcattcagatgtacatgcagatagagcagtcatatacataaaataaataaatagatctttttaaaaaaaatggtttctggtgcaagttgactcacgttgacttttgtcttgactttttggatcacctttcctttaaaacaaaacctccagctttccttttattggttgaaagcctgtattcccttttagcttttagagcaatgaattcccttgatcaataatgttccttttctgggtgtctgcttttctatataatgctgttcacagtacatatatcctttcatccagagatgtggaagtattgtggagggtcttattttatctagaaaggtagaggggaaaaatagatgtttttcttccctttgaattttttttttgtcttagaaggagaatgttaatttacaaaacccacaagttagagtaaagtcaaagaaattaaatttcatgttggttaaatactcagcagactacacgtggtcccctttatagtttacagtacatatcataacgtccacatagcctgcaatgagatgggtcagacacaattgcccatattatcatctctagattcagaaactgaagcacagaaaggaaacctaatttgtctgagcgcgaatgactagttggtggaagagtcagggtaaatggtagagttgcttagtcctgaaactcgcagggcaggcgagaggatggtaatggtgtgttttgggtatcactaagaccccgtggcagctgcctttgacatttcttcttaattaaattcttatttgttactctttgaaaaatgtaagtgcataacggattattttctctttcaaaggctcagaaaacaagggacaagggtggaagtgtaatttagttcattatcctggcatcaaaaattatgtgtatgtgcttggcattttaatatatttaaaatatgaaacaaagtgaatgacaaaggaaaatatggatcccagggaaaaccaaaagccagcccaggctccaatttgacatctggtgtaaagctccaggaaaagatggtctgaatcacaaaagggccatacgcgagtatgctgctaagcactcctacttgctttcctttgagcttttgaggtaaggatgcttaatatccaagaaagatgaaactaaaaaggaaaagggaagtgcgcccagcccattggtgattggtagagtaattgtgggcatggccccaggatgatagcagcttctatttaatcaatgttgacaagactggggagagctgggcaggtcccaagaggtaatgttttactcggaaatccactcaacctaatttcagtaatgtagggctgtggagggacctggaggagagccaagaaacggggccattagagctgcatgtgcgcgtcggcagctgggaacaccgccatccctcttaacagcatcgcaaccgagctgcctggctgggcacgcaagcagccgctgctgcatatgttcctggtgtttgctcaccaacagaaggaaggcacagacatgctattcccactcaccctttcaaggtaatgaatgacgcccatcagaagccaggatcttcttccgcaaggataggagagtcaggttgacgtacaccttgaatgactatggtgaaattgttcactcaaatctcttccttagttttgtcatttatgactaacattacatggtataaacggatccaggaatatttaacgcatttattgttcttttaatgtgactttgagcattttaaaggatggtcgtcatacagttaggggtgtagctaattggcagagcacttgcctggcttgactaacatgtacacagctctgggtccaatatcaaatgagcactgagaaaagaatggtgtggggagagcatggtagtcatgggtgacaagtgtgggaaactaagaaggtctcctgttttttaacatatgacattctttaagaacattcaactttgcaaatttaagagaatttgactcaagaaaaatgatgttgaactctaagtctctctctctctctctctctctctctctctctctctctgtgtgtgtgtgtgtgtgtgtgtgtgtgtgtgtgtcctccccccataagcaacacatcattctagaaactgcttagcatatacagtctcagaagacagacattttcagtttgagtttcattgtaatcactgctaatctacttctagctcatagaccagaacacagctcagtctctttcattaggtgcattaatgaatggatgaccacattttccttctttttcaagtgtctttcagctttgaagcatgaataatagatgactttattgtctacgatattgactttctcttttaagttaacacataaataaatgataaaattaagaggttttctgcaagcatgataatttctaagagttctttaagttgaaaagagcaagattttgcaaaggctaaactgctggataggcaagttacaactatttgttaaatattaaaatcatccgtctaaggtatctcaatattctttttataactaggtggcactcacattacttagactatggcataaagagaaaccgaattcaatgtttttcttgcttcctagcttaagcttctcctgtggatataattgtttactcttaaaaatatgacatattttatttaaaaattctctcaatctcatacttaagaaacacatgaatattttttcttgttcttaatgcaagccacagaaatgcatcaccagtcctcatgagaggatcagatttgcggagctaattttgatatcataatcaatttgaagagacatcatccggtcatatgatacatccctctaaaacacacacacacacacacacacacacacacacacacacacatacatgtatatattatcaaagtagttcaacttggctgatatgagaaaatatactgcaaattggatggcctttaagtaacagaaatttacttctcacttttttggcatatggtagatccaaaatcaggctgacaaccagctcactttgtcaagtgaaggcctgagaccttaaagatctatcattctctgtgtctccacatggtagaaatcaatagtgagtgcttggtggtccagttttaaagaaccctctgccaaatcatgaatgctccattctcatggtctaatcactgctaaaggctctacctcttaatccttttaataccaacagctacgatcaagatttccacatacaagtttggggcaattcaaacacccagaccataggcgctgtgatttttctccctaattataggggaaaaaaacaaaaatttaacaaaatatcaatattaatattatattttgtgcttaatatgatgaaaagtagcatccagagacaaatggctgaggaaaactgtgttctactctttaactgtcatggcttctgctttacttcagtattccacgtcagactcactcgttagctctgagccctgttacctctgctcctttgttatccaatcattggtgtctcttggtacctactatgtgacttcagtcctttaacttcttcaggctcttaagtaacaattgtcacagagggaggatgatgctctacatgagggatgtagttatttatgctaattggattgtggtaattggagtgaccagctggcctcagccattcatgtctttcacacttcccaccatgatcgaagtgggttttttttttccaaaatgccaaagattacatattaactcatctctagcatttaccaattacataattagcaccagaatgtgccaaggctggctttcatattatgaagcactaatcggggttctccccaccattttgagatgtttgcaagtccaatgtctagattttattggcactgagactgaatatctatgtcatgtcacagttcccattgaatccatccatcttggttcaggtaagctgagaacaaaggacgcaatatcaagaagaaagaaggcttgagtgggctccatggcagcctggagtaagctgtcacttaccatccatgtgtacaaattatataaattatttaatcttttgcctcagacgccccaaatgtaacatgaggtggtcaatgaaactgtaaagatagacacgacacagtacaagtctgcttaaaactgttaagagtatcaacagccgcttagaagtgttagttgaagcaacataccttaacaaagggccaggactgtcaaaacttacagtcacttccagaagaaaacacaaaactgtagatccacaactcaatggccaacgtgatttgttgtctgtatgacttgtttatggctggcgtcagtgagggtgaagcacattaataacacagagaagttctttcctgcatgagtattcaaacggacctactccaaattacagagattctaactgattcttttctctctgatgttaaaatccttcagaggctgcatttagtgtctgtaaaagcaggccctgttaaagtagatataaccgtgtctgactacagtttctttcattggtatgtagggttttctttagcaatatcatgggttcttctgagctgacctcacattgagtccatccatcctgattggggtagggtgagagactaggactttccagtgttccttcctcccgacttttatttttctttgcataatttctttcgagcctataaaagcttcaccaaaccccccgatttgatacattttattctcatgacatagtcagctcttgatttcaaacaacaacaacaaaaagtcaatctttctgctcaatattctgccaggaaaaacactcatatttcaagcaagataagatatacacagaattaactttatgtgttcctctggatcgagtttcagctaaatgagattcaggtgaatcccatcaattgtcattttctgttatttacattctggggtgtttaaaaaaaagagatcttcgttttttttagggaataaaaatcttctagactctggctactggttttctagtgctcatgtggtaaattaagtattttcctgacttctgctgctcaagtttgttccgctgatataaaacaagtagaagagctgtactttagtcatggcttggctgtcagtaaaccaaatgagttggggaacaattctttctgcacttcaatttcaccgtttatgaagtgaagatacttacgcttgtttcacccaatgcttattgagagctctccctgtattatgtctgtgctggacaccaggattcaaaaggggcaaatataaggacagaaatagatatttttgtttagacaaggagtttatacctaagttttatgttaaaggtctccatcactgatagctataaatatctctttcggttaaataagtgtaatgaaagatttcagttataatgggatgtttattattgttttcactgtctcttcaacacatcacagaagatgtgtttgccatatgcaggtgtgtactacatcaattaagtcaatatatgtatatatattttgaagtatcaaggaaaaaattgtaggttaaaaatctctcttaataaagaactttcggcagtgactagctctgtactcatagttgtcttaggcctaagcaaaggatgagaggagaaactgttcgaattgaagaggatttagcccgattacaccccaagaaagaccagaagtagagctgcttttcaaagtcattggaatcttggtcttctgtttattttcttagaatttcctcttttgctattatacaagtactaaatctttcttatgttacccagcacacaaccccttttcttttgagcttcatatctccctcgaatcacacatctcatggttccaaaggttttatttcttttttttttttttttttttccattttttattaggtatttagctcatttacatttccaatgctataccaaaaagaccccccttacccacccatccccactcccctacccacccactccccccctttggccctggcgttcccctgtaccggggcacacaaagtctgcgtgtccaatgggcctctctttccagtgatggccgactaggccatcttttgatacatatgcagctagagtcaagagctcaggggtactggttagttcataatgttgttccacctatagggttgcagatccctttagctccttgggtactttctctagctcctccattgggagccctgtgatccatccattagctgactgtgagcatccacttctgtgtttgctaggccccggcatagtctcacaagagacagctacatctgggtcctttcagtaaaatcttgctagtgtatgcaatggtgtcagcatttggaagctgattatggggtggatccctggatatggcagtctctacatggtccatcctttcatctcagctccatactttgtttctgtaactccttccatgggtgttttgttcccacttctaaggaggggcatagtgtccacacttcagtcttcatttttcttgagtttcatgtgtttaggaaattgtatcttatatcgtgggtatcctaggttttgggctagtatccacttatcagtgagtacatattgtgtgagttcctttgtgattgtgttacctcactcaggatgatgctctccaggtccatccatttggctaggaatttcataaattcattctttttaatagctgagtagtactccattgtgtagatgtaccacattttctgtatccattcctctgttgaggggcatctgggttctttccagtttctggctattataaacaaggcaccacagagttcccatcccccacccctgcttattttgctttgaatcattccactatcataaattataaccatggatagagatgtttgctgagtctacaacttctatctgaaaaatcactgaacttaggaatgatgttggtttggcacattaagatgtctgattagttgataccaagtaattttagggaaaatggattttgtttatacaggctggtggtatattagtagaatattttgtggcatataatctgttggctgaattctccagagaaatttttagaattgggggaatcaaccgtcataaagatataaatctaccttgttaagcaaagcaataacggtaccacagatctgtgttttcccttggaacgcactgtactctgctgtaagagactgtaaatcacctccgtgttttaagtggttggttatttatctccctcaccgaaaagaatgatggacaggtgttcaagtgtgggacaccccatgcaatgatgagttttctttctgttccaccatatttagtatacaggttgtctcttcatggtcataagataggtgccatgtttccaggtgttatctggtgctcactatgttggggaaaggagagcacaaaagacaagacccaagtctaccctctcaagggagattgccttcctcctaattaaactgcagttatcagtaagctccccatgctccaacggaggtcaaaattcgcgtattttccttttcaaatttcacattattaaaaataaatggcaagataaattgggactgatgcttgatgaaccatatgaattatttgctgcaattattttgacactgagtaacaggaaaacaaggttattgccgaacctcaactgtgaggatggaagactgataatcacagtgatgggctggagatttggtcaagatggccagcctgtgttcaatttcaggtacccacattggtgggaatagagaactgactcctccctccaaaatgttatctgacctaaaactaactctctctctctctctctctctctctctctctctctctctctgtgtgtgtgtgtgtgtgtgtgtgtgtgtgtgtgtgtgtgagagagagagagagagagagagagagagagagagagagagagagagaaactcgcgcacgaacacactaaagaatgtagtatctactgagggaagactcatccttcttccttgtgtgttgctgagcagcatcctagactaaaggcttttgatctagaaaattgtattactggataataatcatcacattattgccatcccttatgcaatgctttggaaagaagcaatgtcttgtaccattcaacagattccagagacaaaatactaactttcctctccctcccccatcttgttttcttcctcagacgctgtagacgaagccaaacctaaggaaagtgcccgacaggatgagggtaaagaagaccccgaggctgaccaagaacatgcctgaactttaagaaatggctttccacgttgcccccacctgaaccctgtctctcctgcccttctcagctccactctgaagtttcctctcctgtcctgctcacgtgtgtgagcctgtcctctcctacctatgagccctctctctctgtgtggcaaacatttaaagaaaaaaaaaaaagcaggaaagatcccaagtccaacagtgtggcttaaacatttgtttcttggtgttgttatggcgagtttttggtaatgatgatgcagtcatcttgggaaattcttgcactgtaccccggttttttgatctggtgcgtgtggccctgtgggagtccactttcctctctatttctctctgttccaagtgtgtgtgtgcaatgttccgttctgaggagtccaaaatattaa

SEQ ID NO: 310 - DNA, 737 bp, Mus musculus
ggaagaaggcaggggaagataccaccatgctgtgctgtatgagaagaaccaaacaggttgaaaagaatgatgaggaccaaaagattgaacaagatggtgtcaagccggaagataaggctcataaggctgcgaccaaaattcaggctagcttccgtggacacataacaaggaaaaagctcaaaggcgagaagaagggagatgcaccttctgaggagaagaagggtgaaggggatgcggccccctccgaggaaaaggccggctcagcggagacagaaagtgctgctaaagctaccactgataactccccgtcctccaaggctgaagatggcccagccaaggaggagcctaaacaagccgatgtgcctgctgctgtcactgatgctgctgccaccacccctgctgcagaggatgctgccaccaaggcagcgcagcctccaacggagactgcagaaagcagccaagctgaggaggagaaagacgctgtagacgaagccaaacctaaggaaagtgcccgacaggatgagggtaaagaagaccccgaggctgaccaagaacatgcctgaactttaagaaatggctttccacgttgcccccacctgaaccctgtctctcctgcccttctcagctccactctgaagtttcctctcctgtcctgctcacgtgtgtgagcctgtcctctcctacctatgagccctctctctctgtgtggcaaacatttaaagaaaaaaaaaaaagca

SEQ ID NO: 311 - protein, 178 aa, Mus musculus
MLCCMRRTKQVEKNDEDQKIEQDGVKPEDKAHKAATKIQASFRGHITRKKLKGEKKGDAPSEEKKGEGDAAPSEEKAGSAETESAAKATTDNSPSSKAEDGPAKEEPKQADVPAAVTDAAATTPAAEDAATKAAQPPTETAESSQAEEEKDAVDEAKPKESARQDEGKEDPEADQEHA

SEQ ID NO: 312 - DNA, 1133 bp, Mus musculus
agagaggaggaaaggagagaaggcaggaagaaggcaggggaagataccaccatgctgtgctgtatgagaagaaccaaacaggttgaaaagaatgatgaggaccaaaagattgaacaagatggtgtcaagccggaagataaggctcataaggctgcgaccaaaattcaggctagcttccgtggacacataacaaggaaaaagctcaaaggcgagaagaagggtgatgcaccagctgctgaggccgaggccaaggagaaggatgatgctcccgttgctgatggtgtggagaagaaggagggagatggctctgctactaccgatgcagccccagccaccagccccaaggctgaggagcccagcaaggcaggagatgcaccttctgaggagaagaagggtgaaggggatgcggccccctccgaggaaaaggccggctcagcggagacagaaagtgctgctaaagctaccactgataactccccgtcctccaaggctgaagatggcccagccaaggaggagcctaaacaagccgatgtgcctgctgctgtcactgatgctgctgccaccacccctgctgcagaggatgctgccaccaaggcagcgcagcctccaacggagactgcagaaagcagccaagctgaggaggagaaagacgctgtagacgaagccaaacctaaggaaagtgcccgacaggatgagggtaaagaagaccccgaggctgaccaagaacatgcctgaactttaagaaatggctttccacgttgcccccacctgaaccctgtctctcctgcccttctcagctccactctgaagtttcctctcctgtcctgctcacgtgtgtgagcctgtcctctcctacctatgagccctctctctctgtgtggcaaacatttaaagaaaaaaaaaaaagcaggaaagatcccaagtccaacagtgtggcttaaacatttgtttcttggtgttgttatggcgagtttttggtaatgatgatgcagtcatcttgggaaattcttgcactgtaccccggttttttgatctggtgcgtgtggccctgtgggagtccactttcctctctatttctctctgttccaagtgtgtgtgtgcaatgttccgttctgaggagtccaaaatattaa

SEQ ID NO: 313 - protein, 227 aa, Mus musculus
MLCCMRRTKQVEKNDEDQKIEQDGVKPEDKAHKAATKIQASFRGHITRKKLKGEKKGDAPAAEAEAKEKDDAPVADGVEKKEGDGSATTDAAPATSPKAEEPSKAGDAPSEEKKGEGDAAPSEEKAGSAETESAAKATTDNSPSSKAEDGPAKEEPKQADVPAAVTDAAATTPAAEDAATKAAQPPTETAESSQAEEEKDAVDEAKPKESARQDEGKEDPEADQEHA

SEQ ID NO: 314 - DNA, 98342 bp, Homo sapiens
acggagagagagggaagaaaaagacagatagatagatattggggggaaggagaaaaaaggagaagagagggaagagaggacagcggagagagagcaccagagagagagggagagagagagagagcgctagagagagggagcgagcatgtgcgatgagcaatagctgtggaccttacagttgctgctaactgccctggtgtgtgtgagggagagagagggagggagggagagagagcgcgctagcgcgagagagcgagtgagcaagcgagcagaaaagaggtggagagggggggaataagaaagagagagaaggaaaggagagaaggcaggaagaaggcaagggacgagacaaccatgctgtgctgtatgagaagaaccaaacaggtagagctaaagattttttacttcttgctgttgtgaaataacccgagtacagtatttccccgtaaaggcaaacaatttttttactgcttctgctctggccgtggtgctcgcgcttccttagcatatggtaactgatggttgcatcccagcttttattcttttctgtctttcatgctctggttttggaatgctgctactaattagggtgagggtagaaaaaacatgcctgtttggctagaaataatttttttttttcttattagtgaatgctcagcatttgaggtctctggtcttgagggtgtggacgtagaaaggggtgtgggggagatgatgtgggctctacctacaagatggggaggcatttctttatattatttgcaaaaagcagggttgaggaaataatattcagaactgagtattgcctctctgtcatacaattttctcacatgtgctgcggaagatgccttatttcgtgcatgcatgagcttcgaaggggcgcaggtatttatggaaaaacgtgcaggtcttatttatttagtatttatttttcaatgaatgaatgaaactgtgatttgatagattttttttttttaagagaagctaagacaactggggctgggggagaaattggccatgcagaaggggaaaatccccttcctaagatcagcagccgattgtgcaccagctggtcggaggagagggtggaccacgcccctaggagctccgatgggatgggaaagacagccgggtattacctgttggaaaccaggtcttttctcttatccccttcccttgcttctttcctgggattgtcagtgaccagagacaggctaacatcctggataataagtatggtgactcattttcatcaggaagagggacacatccaagattagcaagaatcagagcccctccttccctcccccactgcccaggttttacagccatttccaattgctcgcttatttcttgaaagacattttagaaacttgattggggtgagagtgggaaggaatgacgagtgtggtattccgcagcaaccgaccatgccatggcagtctccaaaagaagctttcaaacatttgttggaatgcatttgagtgattttggcaaaggttaaagagaaaaatgggtgtgggatacgggtgagtgtgtgcgtatgcttgactgtggtgggggtgggggtgtggtgggggcaatcttggtcaaagaagcccttcgcagactgattgccttaggggtggggtgcaagagatggaatttgggtataatttccagtgcaggtattggaaattgggcaatttgtaatacactccctgaatccgaagggggtggaagagagtggagaagaaacagcctgccagcttagcacatttagccagcgccctggaaggaagggtggggagtgaggatgaaggagaaggagcaggaagaggatgggagactgaagcagaatgtcagagcagtgggagtagagatttggcataaataaataaataaataaataagcagacatcctggattgtgtggggctatttgggggaaaaagtcggatagtgggggattgagttgggggcggtatttgcagcatctcctgaaactgccctatggttacagagattgatgcttccattggctcattttatcaaaccagggcattttctctctgtgtcctccttcattttaatatataaatgtaataaatacaggtgtctgggttaagaacactgtcaaagaaaagtcctgaggttatttcactggtgagctggggaaataacatttaggaaggtggagcactaagtaagccaaagccatccacttaaaaagctttaattttggaaagaaaaatattcaggttcataatttgttcccaccctatgtgtacatatgcaagtatacatacatctcctttaataaaggaaatcatgtatgatttttagaaaaggaattagggctaaaggaattcccttcccaaaatgaagacagctgccttccctggggctctatctcaccaacagccccaagcattcactctgatgtgcaaagtgatgaagctgaaattgtgtttagagttgtagaaattcgcatgtaaatgtatacagcatccacatacttcatatgctacagttgcatgtgtaagtggtttccacatgcctctctgtgttttagcatcatttatattcaagagaaaattaaaggtatagaaattgtcctactttgctcatgcattttataaatgtgtacttctgtgtgaaatggtcatgtctcttataaaccactgttgtgtatcattcacattagccagtatttaggataccattcaatcagactaaaggaaatggtgtattcagggcgtgggctcacactacactgactggcatttatgtagcatgagtacttaagtctcacgcaggttgcctgcttgtggatgaaattctgtatcatttatgacaaaatccagtggtgcccatccttctgctggcatctattcatcatcgtagtacttaacagggaataaaacaagggcaaaaacctgcaaaggtctaagctctgccacacccataaaatccagcagaaacgtgggaggggggctgaagggcttgcacttccttcctcttccacttgagcggcataaagaagcaaccttggatttctaagttggaatacattgccagtgggtgagaagaaagcataaatgatctctattagccattagttatcactatagattattatagcaggaagaagagaatgagagtggggtagagatgagaatatggtaaaggagtgggcaaaggaggaataaaataaaataatccctaatattgtattgccttatgattttcaaatatcttggggcttactttaaatagcttaattgccatgtgtattgcagatgattaaaaacttggcaaggtgtgatttatgtctacaaagcaagaaaactatgaggtgtttcttttgttgaaaaataatgactttagtttgtaattgaagtgtaaagaatttcatgcaagcaagtagtccctctactccccagccccccatccatgccaatatctgcttttttcctcatgcaacaaataaatcttatctctgagagtgtgatctgtggtttaaaattccgacctctctgcctttccttgcagtgttgggaaggtgtggaaggatgctgccttgctgcttggtgcaggcgattcttcctagtgataaattggattcctcccaaatctctctgagccacacccagtgtcactcagggacttagtgaattaattaagctgagccattttacttaatataattgaagcttctcgttcttttttttttttttaatagtgattttcaccacaggtttccaaatttaaacagaaaaaatatttgaagggcattttctttcttttttctttcttttttttttttttttgccaaattatctggacttgcagagaaccttagaaaattcatggtgagtctagaaagtgttcatttctggtgactctataattccttctaacccatgccagggcgcatacacaatgagccctgatctctcctgctgacagagtctgtgtaactctcttccccaccccctcccctaccaacccatgctgaggcaactggaataagaaaatgcagagttaattttctttcttgctgagctggcaaaactacagaaacctcctttgatgtttcaagctaaagggcagtactcctgttcaccgagagggagagtggcttggggtctcctttgcctctgtcatagtgaaattgccagtgttattcctggggctgaattaatccacagacttcagaattttacctggccccataaggaagggtactggtgttctttcaggcaagaatagagcatatatattaaccaatcgtattgataaagtaagacaagtcttcctctattaatagttcaaagaatgcacataaccaggtcatctcaagagaaggtatagcagcatttaactattcacttccctattagtattaataaaggcattagggcaaccaagcagtggctgttgcaaaccaaagaagtgatttcatacaggaattctcccttttcaatttgtgaagtgtggtcaggtggcttttgtacctttgtaattaaatcttcataacattttcagaagtgttgggaagaatattatactgtgagtccttagtggaggccacttactgactgtgagctttaataaaccacatcaccttgggtttcagtttccttctgtagaatgaagagtaaaaaccaaaaaccagacacaaatgaacactttgcttaccttaaggatttttgtagggcttaaacatacttgatgtgaaaataaagatcaatataagaaatttttattctccccaagttttgcaatttgaggcttgtcttagaggccccagttttgcaggatgatctagtgcctgctgtgtctacctttccctgttagagatgagttccttctagtcttagttgagccttctgcttgtgctcttgctcctccccccgtgttttccccagagccccagtccctcatgccctgctctttcttgagatttcatcttcttgtgctgcactggctcctttccttatagtttatgaatatgcttttgcctcatctatcttaaaagattctctcctgactctatgtccccatctctatagttctctgtctcactctccctttagaacaaagttccaagtactctccaccctcattttctcctcttcttcactccccattcactattccatctagtttaatttggctttgattttcataatttcactgaaaaacatattctgaaagggtgtcacatccagtgacccttcattttacatcttatttgatgtctctttggcattttgtgttgttgtcaatccctgttcctgaaactgtccccttactgggtctgcatgatattaatagctctccttattctccctctcagataagaccctgctcagtctccttataggcttctcttgctctcttcacccacctccccaaatctatgatctcctggatcataatcttcattcattccactcttctcgtttgactcactaatcctaggtgatctcatcaggtcatccacatccaaatctttagccacctgtgtgatttccagatctgtagatcagatgtctgtttttagcttctgatccatagttatcttggtctaagtgcttcatttcagagacaagtttgttaggtacaaaacccaactcagtgtcttctgttgtgtatcacacttgatcttcctcactacaattattgctctgatactgtccatccagcctcagagctctaggaacctgagagtaatcctgaatgtattttatttcaactcccatatccagtttctaaatcctttgattccttgattcttgtttaaaagattgaataaatcctctgcttttctaccctgtttatataaataacctggcacagacttttcatgactactcatctggacaaaagcagtaactttctatgtggagttctaccaccacattgttctttagtttaccttgcaaataacaccacagctatctttacaaaatgcaaatcgggttttgttattttctttgttaaaatataaactcttcagcatcaatgacacaatctagttttgcctgcttttctagtgccaaattccaacagcccccctgctcttttttttttttttacctgatgacaccatgccaagatttcaggccttggtgccttcgcttgtactccactctctgcccatgttacccttccctctcagcctgaaatattcccactttccctgcaagagttagctctttgaagccattcttaaccttcctaattaagttttcttctaccttctttttgcccatgctgtattttgtactatctctattatcacttattgcactatttgacatttattttttcacattctggtgtctaccctgtgagcttcttggggaaaaggatgaaaacataattcttgttttatctctaccataatacttggtacataaaataactcatgttaaccatgaataatctgtttgctaaataaatatggaaccaggtttatagtcttttcacaggctgtagcatatctaaatggatagaatcactaggagatttttaaaaaaatgtcttggcatgaaattttaaagtggaactgatcatcagtgattcttgttattcacttatagacatgacagccatcagtttttaataaaagcagccacaaaatgaacccatttatagactgtatttctctgaactctcatagctggcactatctcccctccatgtcctcctcgtccaacaaccaacattacagccccaccctctctggttaccacaactctggatcttcacatgcccttactttgaggctccaagtacttgcactcactgctttgcttcacaactcttacaaatagaccgtaaatcaatctgtgtgatccatgaaataaatcaactaagagtagcaatatttttttctttaaatgcatgtagtgctggcctgtgcttaggtgtgtgtgctcaaaaattaattttaccttcatttggatttcttttcttccgtctgaagtatccacataataatatttcacaaagataaatcatgattggaggtatagggagggtgaatggtaagtagtccctcaaatgactgttaaaggaatgttagtaccagatgaattggatttttcttaggtttaaatagactgaagggacttgggttctgaagtagtcctattgtgcccagcatggaacaaattgcaaccactgttttccatgaaaacactcttgccagacgctaagtagtgtattttctctgactgaattggcatgtccttgagaacagcagaaagactaaataatttgtaagtgaagtttgtcttcaactggtaaggttcagtagtatttgtcaattgccataccctcacttgatatcttgcttactgctcccaatctctttggcattgagtttttctattattttctcctcctgtcagacccaggtagagtttttctgattaagtaataccagttcatgttagtgtttagtgggtgaggctatggaaggagaactttaagaaaaagtgtgtttcttcaaactttctaaaaagtacttatagacaaaacaggtattttaagctatgtctggcacatcttagattctcaataaatatttgttgaagtaataaatgtaggaagggagggagcatcatgatgggtcattaggggagatgttctgggacagacgaccatttctgattacttattcagcgtgggctttgtgtaaatgcaagctcagctctattggtccccctcacaaggtggatgtagtcaaagttcaattccctctcctgtctgcttagatcagagagacacacttgcagtcatttcattcaggtttagcacgggaatgtgatcttccagatttcctatccttaattatttacagatcttattttcttagatgttgtttgtttaatgtcctgtttcatgtctttgtagtggaataaatcctttccctgggttctagacctggttctgccaattgcttgtcatgtgatgttgggtaagtaatttaacctttctgagcctagtatattcatctgtgtagtgggtacataaaaagaacctccaaatcctgtcttaccttttcttcttaaaattaggttggtgtgagtctcaaataaagagataacaataaaagtgttttgcaaacaatgtgtttttgaaatgtaagtattattaattaaggaatttcatagatcgagcactaaagtattcatggctctaagcaaacaagaagtactcttgctctctgtatagaatacacacattccccatttccacctgattcccatactctacagagtaaattttttgtttgtttgttttttgagatggagtcttgctgccatccagactggagtgcagtggtgtgatctcgactcactgcaacctccgcctcccaggttcaagcaattctcctgtctcagcctctcaagtagctgggactacagttgcatgccaccacgcctggctcacttttgaatttttagtagagacaaggtttcaccatgttgcccaggctggtcttgaactgctgagctcaagtgatccacccacctcggcctctcaaagtgttgggattacaggcatgagccgggcacggctcagagtaaatattaaccatgctaatggatgggaacatagtatctgtttattatttcctttgaaaacttcagtgacagaatttagataagccaatattcaaagtgttacaagacccaaggatcacttcaaatgcattagaaatacccactgtttttctttttatctttttctgttttagtcttttcctcacatttagatctcttttcttctccatttgctaagtttgctgcctccccctctatacccacccccacttcacctccaaactgggttctcagcactaagatggccaggcatgctgtgctcacatccatcacatgagggcccagtcaggcagaagagtggagagaaaatgcagggctggttgggagactgaaaatgtagatacagtttggttgggggaagcacatttcaaagatgatcccttgatcaccatttccacaacctgacttcagggctcctcaatacaacaggaataaaccttgattagagaggtgatatgtaatcctaaacctttccaaactcaactctaaatgccataatcttttgagccctcaagatctccacaaaggacattatagttcttctgtgtccctgggcatgactgggataaattaccactttaaaacaacaaaatttaacagattctcctataagcacagaattctacaaaccaaagaaactgagtttttaaacatatggataacatttagaaatactttaaagtataataactggatcaagttagtctaagaaatcctatttttcctagaagccaaaagtttagcataaaaaaattagtattgtacatattttcccaaaatacttttatacaaagggctcatgtagactgcaatagaaaggtgtgttaactagaaatttgaaaataaactggtgtccagaaggaaataatgatttctttaattatatttatatttggttaatggtatcacctttaaactttcactctagctacatccctttctccctgtttctttcttcttctgcctcagaacacactacttctattatatatgcgttttttgattgggaacaagtatccaaaaccaactttaagagtctataaaaggaatttattggaaaaaaaaaaaagcagcgatcatatgaaattagtaagttgaacaacgaagcctatgggaaccagggtagaatttcaataacaggaattcataaactctttctggggccctgcatcaaaaaagactcagttattaataatcccagctacaattcaaattttaaatgatgagagagaaagagagagataagagagagacagacaaagggagagagggacagagggagagagacagagagagagagaatgaggatgaatgaattttattggtcctgcttgggtcacctagcaactgccacagggccgatatctctgactggaaaaagggctgggtgacataggttagagacaattttggtaagcccacacttgtaaatctagtgagagggtaagttggttgagaattagtctcctgcatatatacctatatgtccacatagtccacatgtgggttagctacccgagtcagaaggaacttatctcaagtgtggtggactattcatttttccttttggttattttcaatttggtctgtattacatattattggtagggttattatcactgatggctctaaaaggaagtagtaaccacacagataactgaacctatgagcttatacacctaaaaaagaaaggtcagagcaaatctccgtaccagtttcagtgtggagatgacagacactgggttttcaccatcctcctgaggcttacctctggcaggtgccacctgtctaggaggacatactagctaccatatattcttgctaatttggaatggtgtagctttgctctaacgtctctttttcaggttgtaagatctagttcctgcaaaaagattggacaataatgggtgtaaaacagctcaattggatttatattacagaaatgctactccttgacattagtcatctcattttgaatgttcttgaattaattccagcaataataaccacatttatctatttttagcaaattggcactttgtaaaatatttgctctaaatgtagaatattggtaattagccttacatccattatttataattccagttccaataactattcaaaaatgttattttaaaatgaaagttgggaagaccctaatatcctttcattaatgactagataaaagagctagatgaggcaaagaaaaaaaataaacaaaatgatctccaaaggttaagcaaactcagaaatcggttgcttttattaagtggctgcagaacttcttagtcagcataactaggcttgactggaacctgtgaggatgcatatcctcttcctattcttactttgctttgattccggaaccaatttatctgcttggaatataagctgagaattaaattcctcttaatggccaaactagttcctataacagctgtttccaagggatttattctacaggtctacacaaattttaatagaggcaattgtctcattatttacctaaaaaggaaagaaagaaaaaaattgactggatatggtggctcatgcttgtaatcccagaaattcgggaggctgaggctggaagattactcaggagttcgagaccagcctgggaaacatagtgagaccttgtttctacaaaaaataaaaaaattagctgggtgtggtggtacatacctgtagtcccaactactctgaaggctgatgaggaaggatctcttcagcctaggaggtataggctgcagtgagctctgatcacaccactgcactccagcctgggtgacagagcgagactctgtctcaaaataaataaataaataaataaataataaaaattccccagtttctaaataattaacttgcagttagatttatttgtccatgttgtactgagggtagcccactttggttgtccagactcttactaacattccagtggggaaaggaataagcattgagttatattttgcatggacattgcatttcggtctttaaatcaattttaaaaagtattattttatttgagagatgggaaggaataagagacttcataagggagaatgatattgtcttacttaaaaaacaccaattctttctttagtaaaatccaaactgggagtttgatctattcaaacgtcatttttttttcctgaaatgcaacatctgcaatatttccttaactctcaaggacttgtttatcctaataaaagagaaggaaattgttttctctatcacctgggaaagttactctggagaactcaggttggtattaaatattcatttgaaaaagtctttcacgataatcctcttcagtgtgcctcagggctttgattgcctttggttgaaagacacaaggtggtagctttttgataactcaaccagatttgtgcatccataatgttggacaattaactggagaactgtatagaaaacctaaggacaagagttccttgcttacacattctttcttccatcttaaactttgtaccttacacctcttgagtgaaaccagtatggaggaggaaatgaggatttctataactgaaaagggagaaggagactagagttataaaataaaattactcagtttggaattgggccataaccttctagtaaaaactgtcatgggatcgttaatgaccacagatggctcagacctcacttctgaacatcatctggaaaacacaataagcccaagagaaacagtattcagaaaagaatccaagaagtactctgcaggactaggtatgaaaagaaaaaaaaaaaaataagtgtgagcactagtatgcttaaatatgcataaccaaacttaggactcaattcagtttttatcttcacttagtggaacgaaactattgattcttagctaaaaagagaactgccaattttgctgtcatggttgttgccatatcttatgctagaccaaatctttcagcaatgaatggttttcctgcaagcttctaccgttctcctgcattatcattcccgtgtcattggaaactgattggtttgtgtacatacttaagtctattttattaatcatatcttaccaaaattgttacttttgctcaacctggatatatagtaaaactccatctgtaaagaatcaaaccatgagaatcataagaataccaataggaaaattaactttccattattcaaggtctccaaatattaaaaatattatttttccttttactctttgtggttccctcaaaaagtgtcatgttgaactaactatcttctttgcaaattagactttctactcccctactcttaacaatatctttgagagatcccagcacattctcagtttcccagctcataacagaaataattgattactctccttctgttataaaagtcatactatcagttaccaaattctttttgtaatgtatttcacatatgctcttttcatcttctgccagtctttcttaaccagcattccagaagagagccaaacccaacccttaaagccctaaggccctaatgtccatatgtatgtaatgagttaatccctctcttgtgcatctagatgggtaccagttatataccatccttggaagaagagaaaatagtcactcattttcatgttctgtgtttcagatgagaaactccaggtgaaaaaaggctggacagttaccaaaattctctacatattgcctgctggctaatcttacgtttaatcccccctttccccaaatttcaatggtttctctttgtttacaaggttaattctaatttatttacttatggttgtgtttcaaggctccttaggatctattaccaatttcctattcttgtcttatctcctagtggctctggcattgactaggcttgtgaatttaaataaatttagtctctctcagttgtcatttccttttacgtaaaacgaaagtattgaatgaaatcatctctaaggctttccaacttttaacaaacatgttctatagcaaaatgcctcttttacttggatattctgtcccacccagacttagtataaatttaagtattaattttcctataattttgttcattgttaccgccactacttgaaaagtccccttttgggcctagctcaatcttgcctaaactccgggccctgaatcaagacttatctcatttgtgagggctttcctgactaacacagttctccatgacctgttttgcctcttagatcttttgcagcacatactacctgtcctttgctttggcattcatcaagcagagccttaaccatccatttgcgtttttatgtacctgattctgccaagtagtttgcaaactctttaagggtaagatatccagtacagtgcatgactcaagaaacacatattgtatctactctgtgataagctctgtattagactctaagggaatgtacaagccaaataatttctcagaaagacaggtggaaccatcttgcattacctctctgggacatttgacatcatgaaacataccttgcctcttgaatctctttattttcttggctttcataacacttgatactgctggcttttcccacctacacctttggttgcacttttttcccatgcttggcttctcttttctaccaacctctgaaaagttggtgttattcagcgttttgtccttatacttgcatgttcttactcaacacaagttctgtgaataatctaatttgtgcccataagtctcacttggactagtgaatctcaaattctccaggctctccatccaaacctacttccttggctctagagctttatatcttactgtctactggaaatattttgctgacccgcaggaaccccaatctcaacaggtcttaaaagtaagtcaccatgtcttgctcccaaatctcttcccctttcttatccagtcatgtaattcagaaacagaacccttatatcttctttttttcattggatgctactgttctttctctggtttctataagtaaaaaccaaataaataaaaaaccttttcattccttcctttctttcctcctctcaaaaatatgtcattcatgcaagatgagggcatagtaaaaatataaataaacaaaagaaagaaatatgtcttgactctatccactccatctccagtcagctctaacccagccatttttcatggagactaatgcaatactctacccctataatcaacttcttctaccctcaaccctttacaatctttccctcagcagccagagtgctattttgaaaagcgtctataagattgtgtatctcccctatttaaaaatctttgatagcatcccattccacgtagaatcaaaaccaaacttaatacaaggcctaagaaatcctacattatccaggctttgcctccttttctagtttctgcttaacaaccatgcgcctcttggtcaccaagtctgttggcctctttttagtttttaaaacacataaaacatgttcacacttcaaggcctttgcatgtgttgctccctgtgcacagaatactctttctctggctctttacttgagaagcctttccatctgagtggtgtccaagtcactctctaacacatcacacttttttttttttttatctttttgggatgctctcaatctgattttttttaaaaagtatttacttttcaatattctggtcactgcctatctcttcaagctttaaaacccacccctcttcacatcccagactctattgcaattgtgttatttcatggaatggtccatattatttcatcctttctctctttctaaacactgttccttttgtctgtaatgtcttccttcctctccttttctacatgacacatttcctgtttatttccgtgataataaacaggaaatatgtggctgcagttattttcttctttatggagactctctgatcctccagcctaatacaattattcttcgttttgtgccttatgtctagtacatacctgtattacaacattcaatagactttattatacgtattcatgtatatgtctatctcttttgctataccaggagctcctttcaggtaggagttatgtccatgtatagatctagttgaatgctttgcacactatggtttctcattaaatttgagttgaataagtgcagcctataaaatgaacaaataccagtgtccagtgagtagtatgagatggcaaaatttggttaggactaaggcaaaggttggccagcttacaatgatcagtcatggaaactgttcacttctggcacagtccataattgggcagctaatagatatttcacacagagctaagaccatacagacttggatttcacccaagtgataccagctggttgcttcagcaaataatggtcaccattttatagagagatactttagtgtagtcagaaagatagccgtccttgacactataaacttcttaatatctgggctaaggatgagtactcactgtaaaatatacagctatatcattttagccaattattctgcttcctaagcttggtgctgaacagttagcctttcctcacatttaaagcttgtatcttctggtactcctcccacaggaatcctggtgaggtttcagatcttcccctttgtcaataatataatttatagttacatgtacactgtctcttaccttctctagttaaaaaactatgtacaataacgcttagttgttgctattttttcttgtccccctttattatgggggaagtatccatctgtctgatgttattctatctatccccaaaccaataaacaaaggaaaaatgctagtagattttcctaaagggaaataaaactacaaacggccagaaaatcaatgacttctcaaccctaacttatgtctcctacacacaaaaatataattcctgggggacggatctgggaaggaatgggcttccccttataattctggtgagggaaaaatatctccaattaaatctgttccctttgcaagaatatttaagagaatcaagaagggaaaagaatggtccatgaacattaggtagctagatctttctgaagtgaagctaaataacatagaaattaaatatacctctttggggtctagatgggaaacttaaacactctcttggatttatttttttcaggaaatgttagtctaagtttcaaactggtaacttggaaaataaactttggaaatacatctaacttgtaggttgggatagtgttcactcaaaaataaaatttaggaaggaccaaaagaatataatttttctgtttagagaatggatgatcataaggaaagaaagatgaagtacactttagctgaaaaaatatgtcactttttttccattgtactttaaaatttttaattatgtcgaaggtgaagaagatgcatgagtagtttgggttgccaagaaagcaggtaagacaggcaagtattcagtattgaagacattgatttggtgggatatggtagaattttgagagacccgccagtcatgggtaaaaccacttagagccttttctagaagataattcatttgctattccacttatctggtcatacattcctttgcttccagttttcacaggctttactattaggctgttttctcaacaaaactatagttgacagagtggaaaaccatttctacctcaaagctctggactcctcaattgatgtacacccagagacactgcagtgtcagtccactgtaaattcaaattgccagtaattatacgacattccaagaatacccaacaagtctccgttactctgattaaaccaaatttcttccaaattctctggaactaagaaaggggtttcccttggattccagtgaagggtcaagaggtcaggtctatgttggcacaagaaaatgggagattagattaagaaataatgacgtttaccggacactctccctatgtatgagcttttattaccacctaacaataaaactggtactattttctccacgtgaaattctctttctttctcttttttctttttctttctttccttctttttttccttctctttctttctccctccctccctccttcccttccttccttccttcttctttcttctatttctctttctctctttcttgctttattctgtttttttttttcttttttttttttcaatgaggttttactatgttgcccagactggtctcgagctcctgggctcaagcaatcctcctgccttggccttccaaagtgctgggattacaggtgagagctaccacacctggccctgaaatgttttttcctccattctaccaaaccacattctgccttcaaaaattctgttgaaaaatcaccttcttcataaaatcattttaaacatttcctcattccctatctggttccatatggcactcactatagtaacctccttagcaattccccttttctcatattgtctatgtgtgtgcgtgcacgtgtatgtgtgtacatacacacataggagtttgtgtgtgtgtgtgtatacatacacacataggggtgtgcatatatatacacacagacactatatatatatatagagagagaaagagtgcatttatatgttttgtgcatatattatacatatatatattcacacacacacacacacacacacacacacacacggtgctttcctgtttccctagagactgctaaaaggctcattactgagatttcctctgttttcaatttcacaaggcactatgcaatgcttgcacatactgggtccacagttaaagctactaaatttttattcaagctcccaaggaaaagttgtcaccttctttgtctttatacctgatggtgataattatcattgactagtagagctaaagagagcttaggaattatctagtttgtttttcttttatcttgtatttatttaaccacagcatctttttgacccagattgaaatatttctcagaatccaagaatgtaaaacagataaaaagatgttcttgcggctgaagcagagtttggtggcccagagatctgtctagtccgctccctcctgtctcctctgaaaccccctgttgaagcctggggagcagattttgaaacactgatctacagccagtccttcatggtgcagatgttaggaggttttatgctcaaggccattcaactcgaaagggctaagatggaatttcttcccatgtcagtgctactcttttcagaggggtgaaagaagaccatactcccaatttctagatgtatatatgcctaaattttctaaagttaactcagcatttatgtgattcaggagtaaacagggctcttttacaaatgaagacttagaagttatttttttgttttccaccttttgactcttactcatcttatttttcaattaggctttatcatcaagaccaattttagacacaatatctcctctaatattatattacaatcctttattcattcaaaaaacatttattaataatctaccatgagccaagaactatgctgggtactggaaatacagaatttttttttttttttaaagaaacactctttaccctaaattagctcatagtatagtgtggtagacatatgtgtgtcgatttaaaagtctgtattctagaatgtgctcttaaataattttacttaatctcaggtagtattttcctaattgttcaagaatatttcccagtataggcttacactaatgtttcttcttgtatagatgtgactatcaacaagccttggaggtttgggggataaattttgtaaataacagaacatccatagatctaaagacttaagtaccacaactccaaaagatttttaagaattaaatgttaatatttataactatgcctgccacatagtaagcacttaacattagttattacttgttattgttgatgctgttgttgataatgatattttatctacattaagtgagtcatatacctaaatagctttttgtggtgattcttaaaggactagtttctggattttaggggtatatgtgtgtgtttgtgtgaatgtatgcatacacatctgaagttcaatgaaaatacaattgattaactgagaaatgagttatgaatgccactgacttaaactttgcatgtcctatgctctcaacactctttaatgctaatatacattgtttcttgcagtcttggaactcagaggtgtaattagccttatcttacagatgtggctaataaaggttgaataaaaatttcaggctgcctctacttagaaaccagagaggctcatcatttgcaaggagctgaaatgtagacatctcaatacctagactcagtcactttttatcttcaaggaatgacgtaaagatgcaatggcaattacaaattatcctcagtgatggtggtatccacggtctgtggctatggtatctacagacccatgctctaatcagttggtggttttgccttgactgtgtttcctgggtccactttcacttggttgctgcctaatttttgagcctgtttctctagccttgccattaatactgtgagctctctgatattatcctaatccatttcaggttctattgcttgcactgaaaaatcttactgatgtaaccctgtagtcagaaatcaggagcaagctgctaatatttttcacctggattattgcaatagcctgggagatttgcactcactgttctgtctgcctaaaatactttgttgcaacatattcacgagtagcttccttacctcttcaggattctactcaaactcacctgtttacatcttatcaaggagttctctcattaccctatgtaaaatggcaccccaccctaacactccttatctgtccccttttgttctctttcattttattttctccagcccttgtatctactcaagatacttattacaatctgctggcaccagtggtacgtaaactccatgagggctccgttactcttttggtgacttatatttcctggaacctagtacagtgcctggtacatatgaggtactcaacaaatatttattgaatgaatatatgaatgcacttaaattatattcagaagtaataataagctaaacacgtgctacagctaatgcatccatttccacctgcctccacttccttcctgattgcttttccttaatctgaaccagcagtaacccatatatttctttcaacctagctgtcagtctaaggtatgtgatgcagcggatttcccaagagtgatgaaagaagaatttggtcctgctcaccactacaaaatgcctatttatttctccttttatattttaattgtttaaatatttggggaggattgtcctgctgtggtaaatttatactcattaaattgtcaagtgtaactgtattatttatttatttattgcaggcactgtaggggaaatgcttgctttgccactggcaccatgtggctttgagtgattattgtattttacctgatagtttttggacaggactatcagggtgatgaatgggtgagagtgggaggagttcaaacactggttgataaaaggataacaaacctgtagcaataagtcagtcaccgtgaagcattctaagcactgaataagacagagcatccattccacaccctatttccattcccagttaatcttcaaagagtcaacatggcaaaaacattccaagataaaaatagcaagatcttctagaaaagatttaagtttcaaggcaaaaagaaaaatcctttatggttactgagtatgctgtgaatccacatagttgtggttgtagctaaaatgctgcatatttcttttctcagcatcagtgatttataaatagagaaatttttaaaaatgaatctctgaaaacattccagaagaaaatttgatttgtgggaattgaaggataaaatgtataatggcaagtggcacaatgtcagacactgggttctgtgcttataacctgatctcaaatcaaaacccaatgcccctggcattctcaaagctggatcatcagaggtttcatttcggatagaagtgaggtcatagctctgctaatgtaaggtaacttcagcatgtctgaatccatctaacagtcttgttgaggcagggagcctaaagaagctattcaatcttttatctttctccagggagaaacaactttaaaatgtacgtattgttggcccctatatcatttttgtttatcaatagatcatctattgctttcatggtatctcaagagttagaagaaatttagaaggcatcttatctatgagttattcatttattcattaggaaatctttatttagtcccactataaattaaaggatatagggtaaatatatgaatcagatatgtctattccctttacaggattcattaattattttccgtgacatccttgctaggttggagttcaggctttggtgcagtatctccaatattttttgtgttgatgctactcatttaatacaatactcctcaagtgagtgaaagcaaattagccttcacttgaagtagtgaggcccaaccaactcttctttacccctcattattcaaaaagtcagatgtagagaccaaagaaggatcagagtggaagtgctgaacagttaacttagtgaactctttcaccttatcttcttgttttggcttctgtcaaacttcattgtacctggtcattctctatgcttatccagagatggaagcaaaatactaaaatttcatatttgtaacctagtaaatactagtatcttggtggaaaaaaaacccaaaaatgatctaaaagtccccaaaccccttaatatattttagaacactctttctattgaatgaaaacttaactcagtttagttttgtttgcatacacaaatcaagcattggaataaatcttaagagttaaaatgaaataactatatttgtaaaatgcttagaaatatccccagaaaaatatttcttaaggctcttcatcattggctgtggcaagatggaaggcatttcaaggtctcacaaaataaaaagtaaagtagcatgcaaacatatgcagacacaaaactcttaactccggaattttagggattttttagatttctagtttgggtttaagataatggtcaattgtcacttattggaactttgatttagtaataattttaaaaaattaagtgttggactaagttttaaaatttaaaatatactcctataactaaaccatattggattatgcctcttgccaagattattcttaaaccatgatctaagaatctcctattattctttcactgtcaggatccagaaactcagtgccaagggtaagtcagccttagataaacagattgtctggcctaggccaccaatctgtccaacatttgtgacctataaagatttttttttcctgcaagcaactctgcctatgccaactgtttatatgcacagtggaaacttccaaagctgtcatttcctaggtttgctttgcttatacaactaattactactgtgctagaaatttttttctatttattggatcccagaaaggctcaattaaccagtgccttttggtcaaggatagtagctgaagaataagacctcaagattatagcatttaaactttgcacggttcatcttgttgatatggcaaggattcagggataattgcctaataggcaatattgcctaacaggataggtgggggttcagaagggctctaatgaaagagaaaaagagagagaacttcaaatcatactgaagaaatagaggaaagcagaagtaacctgagacaaaagagggaaagcccttcggatatcttgaattaaatataaaccctcagaaatatttacagtgctctaagttagtagattgtcatttcttatggagaagacataattagaatggaccccaaccacaagagacctctctattaagactcatttgcgatttggtaccatattgcaaatgagtcttaatataaaagatgtgtcagaaaccctcttctcacttcactttatatattaagtatctcttttcaggaaaccaaacaaccaacatgtatttcctgaacccctacaatgaaccaaagtctattagaggtagtatgggacattgtgatgggggcagagggatacaaaaccccaccaacaaggagggtgctatgatttgaatgttagttcccctcacatttcctctgttgaaatcctcatctgaggattacatctgggattactatcactgagatagtattaggaggtggggcctttggaaggtgattaggtcatgagagtgaagcccttatgaatgggattagtgcccttttaaagagaccccatagagcttccttgcttgacccttctgccatgtgagaacatgagaaggctcggtctattatacagaaggcaggccctcactagacaccaaatctgccagcactttgatcttggacttcccatcctctggaatggtgagaaataaatttctcttgttaactacagttaaccagtttatgtttattttgttttctaatagcagtgggaactaaaacagagaagaaagaaggttgatatttaagaaatatgtacaaattaaggaataaccctcacaaaaataacaaaacaaggcagtttgtaattaaaatatacaagtactataagagctcaggactcacaggaggaggcaagggaaactgaaagctttaaaaagggaaaaaactaggagagtgcccagtatgaagggagagtagaaggcattccagagaagtgggataacatggggcatggtcatggagccttgaggggacgatcctaaaaaatagtggagagtgtttgatggtaagaattaggggggagggaaaatgagcctgtaagataaaccatagccaacaaaaacaaaaacaaaaacaaaacaaaacaaaaaaacaaaaaaaaaaaacggcctgatagggcaagaactttgtgccattagcagcttttggctaggggagcaaagtgatgtaaaaagcatttatggcacctatgcatgcaggattgcatggaagactggaggcaggaagcaagttaagaggttattgtttgaaacacgtatatagaagagaaaataaaaccatggactagagtgttcataattgaaatttaaatgtaaaatgaattgcagactttttgaagaaaaatgggtcattttcagtgcctatgacacatgaagaaaagtctctgccaatacatgtggtccatgatcctttcaatttggctaaccagttgttttgtagtctaggctgtatgacagtgtgacaaggctcgtcatggaagtagtccttcttttacgcaatactgtgggcccttctgcagatctacttgcattccatttttatttccctaattcttggactgctggctgtatacctcaaccttcttttctgcttctgactccttcaggtagaccctatctgatatgctgtcctcgcctctgagactgggactcctctgtccactgggctctttgtcctgctctgttctctagctttggacaccatcttcagcattgaactccattgtcctatttcaaacccactgcaccctataagccaggagaatccccctaacttgccctatgatgtgtggagaaataaatatgattataagatttctagcttagatttactggaatggatgggctattggcagaactgataaaaggaagaactgatttggtgaggaagacaatgatttttatttccagcatggccagcatgaggaaaacatccagaaagaaatcactaattgaaggtccagaagtggaggcagagggtacagggggcacatgactcaaaggctgattgagagcttattcatcttcgtggcattagttgaggaagggttagaaagaaaagagctaagagaagggcttactcacccttcagtggcagaagatacttcattcagagaaaaagaaagagcagttagtaaaagcatatgggatcagggaagccaacaaaaagaaagctctaaaataaatggtcagtactattaaatcagagtgattaagaaggatgacaatggagaatagaccattgaatataggaataaagagaccattgataatctctgagtgggtagtttagttgagtagtgaggatgaaagccagagtttaaaggcttagaagaaggttgaagtagaagaaatacagataactggcatagaccacaaatctagaaatttggtattcctctcagtcaattcctgctactacaaaaaaaaatcacagattggttattagtaacagaaatttatttctcacagttctgtatgctgatccaggcaccaacaggtttggtgtctagtaaaggcctggtctctgtctccaagatggtgctttactgttgcatcctcacatggcagaagggcaacaaggaataaattcactttctcaagcctttttatgaggacatttgctgagacctcttgacctaatcacctccgaaaggccccacctcttaatactattgcattagggattaagtttcaacttgaattttgaaaagacacaaacattcaaaccataacagtgtcgaatggagaaagagaaatgagattgtaataaaaagatgctatttttcaaggtagggagaaacctgttttaaagtagagggaataatagagaagggaagactgaaagggtaacagaagaaatcaatgtgacagtaaagaagggataagttcaaatgtttagatctcagcagagttccttatggagaaatgatacagctttgaaacagaaaggaaaaagaagaggacaagaaatgtattgaaatgggatggtttatattcaggggatcctgtcaaaatcctgaattttgatgctgcatgtgatgattcccacctttaatcccagctactcagtagggtgaagcaggagaattgcttgaggccaggagttcaagaccagtctgagcaatatagtgagaccctgtctctaaaaaaaaaaaaaaagaaagaaagaaagaaaaagaaaagaaaagaaaatcctgaaaccctgaaaccctcccctcttttttccctcagtgaagaactttggctggctgttcagaggaaaaatgggaaagaaaaaccttcaggggagtttactaactgacaggaatgaattagacagcactttcccaagtgttctatggatcacctgacatagtgtcacctggagaaggtttttaaaatgatctctggaggagacacttcattcacaagctcctcagatgattatgatgcttgcaaacgtccaggagtgagtgccttgttggaggtggatccatcttgaaaacactgactaatttaggaacctagcaggaagctacattgtctctcatcctgtggttatttttctcttcacatccctcacagggctcccttcgctgggtgtatttctatggtaaagagtgcaactcatcccagcatacaccggcataagctcttggttaggtccaaaatatcagcgagggcattatagtatatccacaacccaaaagaaaacctcagtactgattatgtgcacacatgaagtttcagaagaatgtaaacgatgtattttttctactgaattacctttcagtccattaagagtttatttcgggtagccatctgggatccccctctctctgtgagccccctttcttttctctttccctcccataccatctcctatttctctgttcctccttctccccattcccacttccatccttgacttgaagtgggacattagatctttatggttcttatggcattgcactgagctctactctagagactcagcactagaatctgcacatgtggaagatccacaggtgctttcttgctaacctaatcatctctaatagcataactttgatatataactataatttttaaaatcatactctagtcttttaaaatcatactctagtcttttcttactctagtcttactccttctaaaaattaaaggggaaggaaaaagtgtgtggaggaaagtaaaatctggtcaggcatggtggctcatgcctgtaatctcagcactttggaaggccaaggtgggaggatttttttgagcccaggagttccataccagcctcaatagcgagaccttgtctctacaaaaaaataaaaataaaaaaattagctgggcattgtggcatgcctctgtagtcccagctacttgggaggctgaggtgggaggattgtttaaatccaggagatggaggccacagtgagctgtgattgtaccattgcactccactctggaagagaccctgtctggaaaaaaacaataataataataataaagaaagtaaaatccaattctgtcacactgagaaaccttttattatttggaacccatatgccaacaggccctcagtaaatgaagcatggtcagtggaggtggggttctgcaacattatgagtttcttgctaaatgaagtcaagtctctcttcctctttctctcacacacacacatccatgcacactctgcacatacggaagacctgttgtttgaaaagttaagttagtgtttgaaaagtatatcatttgtttttaatttgttgcatgaatttttgtgttcatttggcaagataaattttactaccagttatctagatgagagggagtcaactttgaaccctcatttgatgcctaacctcggcatcaagagaaaaaatctatcctaaactcagttcatatgtacatttctatatttttcttttctcttgctgcattccattttatttaccaacacagaagcagaaggttgtagtttctctatttcctttttctgataaacacctcaaaagcatatagtaatttcctccatttttatctggcccgtgcttttcttaaacacatgtaatctgttcttccctccctcccccactgttctaaaattgctttccctgaggtccttggtggccttgtaatttatatttgcaaagacctttctcagccttcacttaacattttcgcattgactgtgctgaacacttcttaggatcctctctattcttggcccctgttctggccctcttcaattgttactctcctcctctaagctggttttactttctcctctgtcttctagatagaggtgatacaaaaacatgatcttagtttttctgatcttttatttttaattctcttaattagaattttcttccaccttcatagcttcaactatcaccttctcataaaagacactcaagtgtatatttcctgtactaagatgcttctagttgcttactgggtgtctagttccttccaaacatttaccattgaaactgagtccatcacctttccccaaaatccatctttccctttgaattctccacaaataaactgtaccgctcatttaattctgaagatattatcttttttattatttatttaattctttcatttgttgttaccatatttaaacagtaattattttgagggaaagaatcgtattttctacatctctatattcctgtattcctgatgattcttatccagcattctttttttttttttttttttttttttttttgtgatagagtcttgctctgttgagtcttgctctgttgtccaggcttaagtgcagtggtggcaccatcataactcaccacaccctcaacttctgggatcaagcaattctcccacttcagcttcccgagtgactgagactacaggcatgtgccaccatgcccagctaatttttaaaaacttttttgtagagacaggttcttgctcttgcccaggctggtctcaaactcctaagttcaagtgatcctcccaccccagcctcacaaagcactgggactacaggcatgagcctctgcacccagcctcctatgcagtgttcaataaatgatttttattaagacgtttcacctaagttcctaatattttgcatatacttctcactgtggtaatttttgaaagggttgacagattttgatgaaaatgaatagatatgaagtgtaattttggttcagaccaccgtcttgagacaaaatagtagctactaaatgtactgacaggagaatttctgtaacttattaacagtggattccgtacaattttatatacctctgcaactgaatgtgttctgctattcagaacttctgaaagaggaagttaccagccaaagaaattatgaggcaagttgaaggatctagttaggttagactaagcagacactcaaatgagagggaaggcagagctaaaacttcaagactgggtttctctacctcatctgggagaatactgacaacagggcatataaatttttgtctttttgcccaaaatatgaggtactgggctaggtgcggtggctcatacctgtaatcccagcactttgggaggctgaggggggcagataacttgaagtcaggagttcaagaccagctttgccaacatggtgaaaccctgtctctactaaaattacaaaaaaattagctgggtgtggtggcgcatgcctgtaatcccacctacttgggaggctgaagcacaagaatcacttgaacctaggaggcggagggtgcagtgagttgagatcttgccactgcactccagcctgggcgacagagtgagactctgtcttaaaaacaaaataaaataaataaaaaggtaatttttccaatgtcaaaggagactagaaaaagtttttgaagaatggtgtctgcccctactttgtgtggcggggtgaaataccactatttcaccaagggtaacctgcgcctcctaaaacttttatttctcccaagactaagtttacagattcttagaattaatgagttgaaaaagacttgaccatctagttcaaatccctcgttcagagacatgccacatgcttcttaatcctggttgtatgttaggttttctaatcttgcctctgggccttatctctgaagtcctcactctgcactggccctagagtttgagtaatgccatccaaatgtaggtattgctattatattaaaaataacactttgccttgttcatatttaatgaattttcctatgaaagatagattcatgtatcacttttcagatatttaacatctgaaattaaaaaaaaaattagccctaatgaacattttctacaatacatggatcaagagtagagaggaaatattggtctccacatctcccctttccactcccccaacaccaaatccactgtctataggcatttacacattccttctgtgattggatgattctgcctttttcaaggctgaaaaattcaagtcaattgactctcacagatttgaagttttctgctgtggtgtaaaaaatacatccatatttcaattgttttcactttaatttatcagttggccacaatatatataaaacagaattgcctggtgctcagaatgaagtaccaagtgattcaaatattgactattctactcaatttcaatataaacttaagcaagtcacacacttgtccacttatccagtagatgaaaccgcaaaggaggagagtttatctgaaaagttcttctctggagaaagatacttagaaaatacaaatggtccttactaaagaccccagctcatcccaggaagatctgaggaaaagatgagcagacccaatgctacttcagctcacctttcttagcagtcttttttttaaaagctctgttttaattgaacactatgttcctgagtcagaagagtgcttcagtaaatctgccttcctggggcacaacgaatcacacacagtcacactttcagaaaggcgaatcctgccaaacgttggctggacaaaagatggctttttttctcctccagcaaaaattactcaaattgcttgagaaagaaacacagtatgtttatccctgtttacagatatttagctagtgccccttcagagggtcatgttcctataaacagcatcatgataattatatccactgctgcaaagaacagatgtgtaaattggtggtttcttgggggaaaataataccaagtccattttccagaaatgtacacagtacagtgcagctgtaacattctgtgcagaggtctcattagtgtctattactgagtgaggtgatttttaaagaatatggaaattcacggggggcatctagcagggaagtccagagacacctaggaaatgattcagatggtttggtatatttaaaaatttctagtgatactgggcaaatctccacatctaaagaaagtagtaataaatctttgattataaagttttccaggcaagaaatatgtatgagtagagggtaggattaggaaacttctcatgccccacacacctctgagatctgtgtaacttaggtatagactaaactttagtgaggccaggttgcatcaaggtggtcaaattttcgatctgtgaacaccagaatatttctaaactcattgctgaagggtctggcagggatcagggttcctgaaactagagtcaatggttccttatttaaaaagccaatgttaccttggacacaagaattagatgaaatcctttctgctaatgaatttattttgttgtagatacttgcttttccccagggtatatatttatgtgactatatggtaatcagtattatccctaaaaattaaaacacaacactaaggtcagcttattgtattagaatagctattgaacaggtctgttattacaaatatgcatatcactataagcttcactatcttctctctgcaaaattctcttaaatcatgtcaaatagtatgtacagaatattatatacagggatctagtgtctgcctgaaggatgggatttctcctgaactggggctatcagtaccttcacatgtaccaaaactttgcataagaccaatatatatttcataacttagtaaatgtgataaaacactgaaagttaatttgcattttcattgaatactataatattcaatgacattatgcaaaactggggcattttgcttctgggacagaaaagtataaactatttcttttaagctatgcttctataattccacacgaactacccaggaggatcaaagcatgttagaatgactgaaatacaacaggaacagtctagtctgttaatctggatttttcaggcctgggatggaaggataataaattgaggcctgccacatgccttaggccaaagcatgcctttgacactaatgatctaattcagttatctactttgtccaaaattcagccttctcatactctgtgccctggggacataaacaaaaacacagggggtgatgaggtagccccagctctatctggggctctactgactcactctcttggtctcagtttcaagggctatgaaatgtcatggtgtgatggtctcttctaggccttgtgtcttatgttcagtgggtctatgcatgctggaatttagaatagtgattcttggtcatttgtgtgggatagcggctgctgggtatccacttgacttgaaagtaaagaggtaatggggtagaaatagaaaattctgaattgtttaatataaaatcaaggaagctgtttccaatcaggactgtggttcaggtctaaggaccatagatgcagcccactagcacatttactaacatgcagtttgggctctttatactaggctccctcgaccagcatctctgaaagttgaacctatgaattggatttaaacaagcctctttggtgtaaatatgtatactgagggtggggaatccctgatctaggtaaaagaggactttttctgctaatctgaaatttggttgggagaaaatgatgtaatctacctaaacttcgattttgtaataatagaaatgttatctttccatcgttctcagaaagtaaaagtgtatcagtgaaacagccccttagagaagtttcttagaaaagcaagcaatttcctagtaaaaaatggattgtatttcaaaaagaaattgttaaacttgaaacataaaaggctttccccacagaaataacctaaaatttccagacctgtctgtaaaactcagattgatccaaaatgtaactgaaattctatatgtttgcaatggaaacatagaagaaaataatgttactgggcttcggagtgtaatagaaccatttcctcatatataatttcattaaaaatgcaaaaatataaaaaactatatacacacgtacttgcgtataatttcccttttctagtctacaagtattatggtagcccaccctcaacagtactgagaatgaaaattatagcaaaactcttttgtattagttacttctgtgtcataatgagagtctcaagataaatgaaaggagggatggataaaatgatttcttatgatgggcaaaggttggaagaaacatcatgtggggagagggcaaagagaaaacagataaaaagagaataaaagaggaaatgagtggcttatgtgagcaagcgatgagctaaagtggaagtgtaggagaggtgagttgcttaggtctaaggagaaagactgcttaggtgtgtgttcacccccaggacgaagaaaggaacactgggtgagattttgttcaactacccatagttaccaccagatggtgaaactgatcccgggcctcttgggtattgatcagtttatggggagatggggagaagactatctttcacttgttaattcattaatttctttcgcaaatattttttcagtacctgctaagtcccacggactatgctaggagctgctgttaaaatgacaaaccagataaggtcactgcccttaatcaacttacagttgggtgagaagctatcaggtacaagtatggccctagaacaaattagtcttttctagttaataatcttatgtgatgagatttggccttgctcctttggtgacttgcctcaaggagccccaggcaaaaccaatgtaacatatattaataatatatgaaataatatattttgtagacacaattgccttatgttgtccaggctagcctcgaactcctgagctcaagcaatcctccccacctctgcctcccaaagttctgggattacagacgtgagccgccgtacccagccaaaaatgtttattttgattagatgactggtattaatctgattaaccaaagagacaaggtattactaaattcctcatccctggtaacatttccatgttagctgttttctatttgttttttcttttccacaatggtgcggcctagaaacagttaaccttcttcgggctattacataccttagacatataaaaaagctatgagcattcaacactgaaataatcatataaaccaaacatactgcacactacttcagggatactctgaagcccatccttagaccccagactcaaacaaaacaaaatacgatgtaaagaactgacacaaatcatcagagtttagagaacaacgtgacgggcagcagaggagaggagagggttgaagcaaacttttttggtttttttttcctaagtagggctggttctggcttgtcttccttctccccactttgcttcttactcttgggcttacaaactgcctggtttcccttctccaagtcagggcttcgtttctctgccttggccttcctaccccaccttctgcgttctgactccatgaggcccttttcgcgtctcattttctgccttctttaggcgttccctcggcggctctgcagtgtgatctcatctctttgtttctccccggctgccgtcagtcaccggctctctgcgcccccacccgcgcgggctcgcggccgtgctgcgggcgtggcctcagccgctgagaccctggggaccgcagggcgtggcgcggcctccgcccgctgcacggagagccccccagaggcagcgacacggcgcttggggtccgcggggctcctcctccaactccgcagacctccggggaggcctcttgctccccgaacacccgggagttcgctttcatttttaacgaatctccacaatctcttgtttgggagataattgcttctttcaggggcttggagaacaaaagcgtcagcccagggccccaggtctctccgcgggaggagggcacccaggggcgatgcgccgggctctctccttcgcccttcttggcccgctcgccttcagctcccacccgcagcagcaaccgcagcctgcttccggggactgagcagccctgggtcagccaaggttaagcagcgggtggggaagaggagagaaagctgggtcaattggaagtaaccttcttgtaccgcccactttttccttgcttggaggcggcaaaaagcactttagcattcttcgggctgtttgcgcctctttctctaacagggccaggggagtggaagagcggccggcaggaaggtttctttgtcagcaaaagcggacctttggaaactaaacagcaatgctctgtctttagaagacagcacaggaaggaacaaacagctgaggagtgaaggccagagaccccatttggaaaacaatggcctttcatgattattactatttttaaaaagttttctaggctttttcatttgaactttccatttctcactatgaaatgcaggttctatagacaattgcacacaagtttctttttcgggggggagggtaaacgaagcaggtggaaagaagtgagatgattgtagacgtggccaaatttagacttggtgtgagatttcctcttcgcttggaaacacatggcaccagcatgcatttgttcattcattcaataatgtgaatgaacattaaacactacgatgtgatgggctttgtcacaggctgtaagtggcttcaggtccacatgaaaggagagcgaaaaattaaaataaaatattagagagagagaaaagggaagaggggcaaggtgtcaggcagcaagcttcttagggtcagaatgggtccccatccctaaaagctgatgactgaagagacccacgagggtagacgagctgtagagagacaatactgcatctgccagtgatgagtgtaggaagctcatgagggttagaaccttccctctctgttttctgacctctttttctttttaaataggttgaagccaactgtggtagaggataacagtgattcgcgtatcttatttatttatttttagcagccccctcccccgcaactaggacagtgagttccattcagattttcaacacagctaaaaacttggctttaaaacttgtgaagggagacatttctttagaatctttcacttttttcatcgcagaggctttgggggaatgtttagctttttgctgaatcatgaagggtttgttactgcattctgagagggtaggaattagatgcctaaaggatggtgtctgctttcctgttgaggtggtttatttaacagttcatagaggcatgcaggtcaagtcatccttaactgtacagagtcaagggtattgccacatgggaggctggccagcggagaagtttggtgctctctcagtttggagatcctcatgttgtatacatattccaaaattcccagtaattatgtacctataattatatacctataaataccattccagatactagaataagatcacagataacttcttagatgtttcttttctagagaaatagggaaacagaacatatatacatttgcacacaattcaaacttacactttgaatgtttgtcttaaatctcctagtcaactcccttaatgtacagacaaagaaacagatccagagaagtgaagagactttcataaagttggagtcaggttgggatatgtcaggcctggccttcttgctgctgattatttctctgaattttataatagaggcacctctgaaactgtctgaaacttttcatttaaagagatattcaaaaagaactgtagatttctcagaacgggtgtgtttagtctgagtgttgtgggccagtatatttcatcattgaatgtgcaaaagatttgttaaaatggagatattggttcagtgggcctgggcggggtgacagtctgcattgccagcccaaactgcccttagtggtgcagatgttgctggtccacatgtggaacggctaggctgtagacagcatctgtcctccttgcctttccttcttgctgagggaacagccctggggatttaagaagccctttttgtttctgttgccaggtcactgtgctcccttagctaatctcgatagctttcactgccttgtcttcatccagatctaagattgttagaaatagtccctagagacaggtgtcttgagctggagggtgtgatcctttgtatagtgacttagcaccatttaacttggttccacaaaatgtttctttcacacataagcaatttactcaactcagattgttaaaaaaaaaactgtttttccttccacaagtgtcctcccagctgcagctcattgcactcccttgcagctgggagtgcagctggcatgctgctagctcactggtctggcccttccactggaacccagcaagttttctgtgctttttttcaccactctcttctatcctgcacttctgcatgtgacgcctagatttagctgtaagtgcctttgtgcagcatctgagttgagcaagctgctaagatataactgggcagaggttcttctaaggcaggcaaacttcagtgtcacccaaagggtggtttgacttggctttgctttgtcaagcccaccgggctttgatatgactttgtttttgtttgtttgtttgtttgtttttgtttttttgagaggaatctcgctctgtcgcccaggctggagtgcagtggcgtgatctctgttcactgcaagctctgcctcccgggttcacgccgttctcctgtctcagcctcccgagtagccgggactacaggcacccgccaccaagcctggctaatttttcgtatttttagtagagatggggtttcactgtgttagccaggatggtctcgatctcctgacctcgtgatccacccgcctcggcctcccaaagtgctgggattacaggtgtgagccaccgcacccagcaatatgactttgaatcgcaagtttggcttggggagaaactagggcttttttttttttttacctgggagctgtcaaattgcaaaccacagggcatgctcacaagagaagtgggaagatagggaccatttcatgaatttctcaaatgccaaagcaatgcatattttcttagcttgataagcaatgggaatgtctaaagtttgtttttggtgggggtcggggggaaggggaagggcatattgtaatgaaaccacaattcgattttagcttactgtgataaaatatgttgcacagagtggaagacagactaaggaagagagcttcttagattgaatgttatagtgttagcttttattgtcagttttaaaccttaaaatatgagaatagtacttctaggtagagtttctgacatttggtaaaaggagaatcttcgtctaggtcctccctgcatacccactgcactatcgccaccagctacttctgttattgccttgattctctgcagtgatttaaaccttctgttgtatgtttcttgggtgcttccatatcttccatatcatggcatagtcactcagatgcatactcatttaccagaggctgcagaggtatcaggcaactttggtttgttcagcttaccgggttttgatatgactttgaattgcaaatttggcttggggagaaattagggaattttctatgtagtaactgtcaaattgcaaaccacagagagagttggctactggatttttctgggaatcatttattcctagtcttgggtataattctgagctgatacagtaatatgggaaattcttggtttctgagaagtaaatcagaatcctggtaagagtggtgacatcacctcttgaactcaggagagtctccaggactttttatgcagcaacacatctgtaaagctccccattgttggagtttcactaatttggtgctctgtacatccctttgggccatgtgacatcacttatgagagggttgtggcatgtctcatagtgttgtatatgtcaagtagaaagttattttcattgacctcaagactgcagaattagacaatatctccctatttttacccaatttagccaaattctttcattcaaagattagattattattaatccctgaacgcaggttcataggaattaattcaagagtcgtaaaatttgcttgcctggtttccaaactaaataaaagggaattttctttctttgatggctccaaagggttcggtgtttctccctgcagaaccacaaagtgggaggtgtgctgctgctttgtaccatgaactacacagtcatcaaacatatacattttctccacaacctatgctgcataaataatatgatactttctgagtatcattcgattcagagcaatttgtacggcatgcgtgaaacagttctagatggggtttccttatatacctcactacaattgtgaaaaaaaggaacacgaatagttggttcaagtaaaaagcaatgtttaattcaggaactcaggctgaatttaaatcctcacactcaggaataaatcgcagaaccttctctttaccacctgctcaatcccttccttctgataagaatgcataaggttgactctagtccattcatctgcttttctcatttattaaatagccatagttcctgacctgatgccctctccctccctcttctcccagtattgctttccctgctctctgatatttttctcttttgctttcagaattaaaagggaacctggtctctgggttgttttcaacatctcaagtgtgaattttccctgtcaaaatcttcacaaggaaaatgagtcacagcatcacctgggtgacgaggtcataacacctcagcccttgcttaaaaaattttatttctacttttctattgtaaagagatctcaaaacaggaagataaaattggactgacagctctacagcctagtcttttagacagtgaactaggccagcattggcagacactggcgatgacaaagtcctgctctgaattatgccaccccgcactccactttttaccttgcctgggaggcttgaggaaaaatcttcagagagcagttcgacctagtccttattcacttggcttcttgactttctggatttcaagggtaattttacctcacatgtaacctatacaagtattttaggttaaaaccctgactctgccacttactagctgtatgactttgagcaaattacttaattacttaactaatgtccttctacttagtcttttcatctgtaagataatagtacccattgcatagttttgttcttagaattgaattagttaatatacaaactatatgcaataaatatgtttggggtgtgtatatatcatataaaagtgcttagaagagtgcttgacatatagttttagaatttgctattattatgttctccaagcatatgagggtattttatgtcattacttttaaaggtcgcttttttatatgtgttagtgggaggcatttattatttttttaagtgtgcatatccctgaaacatccctctgtggagctataaaagaaaactataaaatatttaccatataattcactcaatccccagtctccagaaagtaacaatttgtacttcatttgtattgtcttcttccaggcattttacaaatactattttctttcatcctcaaaaaaattctgcacaataggtaataggattctaatatgggtgataagaaaactgaaatttagagaaattaagtaatttatcccaggtcatacatttaagcagtgaatgagccaggattcaaactcagatcttttgaccccaaaaccatgccaggtagcaagtaatcaatgaatgtcaatgacagatcatcgagagagaatccagtgccaaaaatgaagagggtgtcaacaaaataagaacaaggacaatggcagcatgagcaacaagaacaaacttagatccaaaattaacagttaaagatttttctagagtcctgcatatttttccttaaactgtccagcagcttggggacagaaatctaattaaaatggaagtctatgcatgctcaaaccacatgccttgtacctgatgcaatccgcttccaccccagtcctgaaaaaaggcattcagttatttttttctacatgtggaagaatacaacaacataccttctagaatcagggagaaatgtacttgctctttttatttttttttaatttctcaaatactgttctataaggataatcactcacctggtgattaatgtagaatgttaaggtgtgtacaaattactgctgataggtaacactgtccttgcaaaatcatcccatgtgcccccctcaaataaataagtatacttcaaaaagcagtgtgcttgctatacaagtgcagttttaagaaaaatcactcagctctctcttgcaaacatgttctttcccctaatgcctcctacacagagattctggagccacccccttcagaatatctgaaatatagaccaattttgctcgttaaaactacttcaagtagtcctagagctgatattaggattgctacttattcagtcatacttttcgagtgttcattgttgaattcttagattgaattttctattagtttccttaaaatataagaggttggagggctaagtttaagacccattctactaattgtgaggctttccacaatctgtgtttccttatttttttaaaggggatggcacacttgcttagccttcttcattatcattctcagaggaatcattttaagttgaaagtacttcataacctataatgcataaatttaaaccactgtcatttccccccaccacagcccttggcaaatggggtcttaaattccttctcccaccaactagacttttagcatgcattctgacacgtattgtgtatccttactagatatgaggtatataatatttgggctttactaactatccagtgggggtgcattggatatacttggcttggcaatttcaaattataatgatcttcagtaccagatgctcttaagctagtcccctacaaatgtctggcagcttcatttgtaacttttatcaggcttgagtattaccacacacaagcacatagagtagctctcagaacctgcagaggcaattgttttactagatgtgtgagggatatagttggatcaatgggatagatactgtatatgaaatagtggctaaatgagtttgtgtgtgtgtgtgtgtgtgtgtgtgtgtgtgtgtggttgggggatgtcaggtgaaggtcacatattttgggaatgaatagatttctagtttcagtgaatttctatcactaagctcctacactaggtgaagttttggggggtgggtaagttagagaagactgagaaggaatcagttggtgtgtgtcaggtgatagtagagtgggactgtggtttaactttgacaatgtaaacagatcttcccccttcccaagataagaaagaacagagttgagtactatggcacattttacatggtttcctgcttatctctttctttgagaatagatatagctcagtagtactgtcgagttaagaaatagcttttccaccctctgagtgatgatacctacaatcatcaggatgaatacagtctcatgaccaaatctcctctggtatttgtcttatcaacatgccttaacttaatgtcacgatgctctagaaattactctgagagaataatggtgatggcaataattatgatgagaataatggtagcagccacccctttctgagtatgtacaaagtgtcagggactgtgctgggtgctttatgtgcattaactcatttgattctcatatcagcccaatgggatagtttttttattccctcatcctgcagatgaggagcctaaagctgacttgcccaaggtcaggatctaccaagtaactggcagagctggaattcaaacttacacatgtctaactccgcagcccatgctcttaagcaccagggaatattgacttttacaggaggaggactaagcaagggctttgtcattcagaagctggatgacgctggactccttcctggttcctcatctgtgttgattataaaacaggcacagtgatgtgttcctcacatgatcatgatgaggattgaattgaaatactaaatatatatactgtgcacttataaatgtaagaagagagaggaaaatgactgctggagagtggcgtgatgaaggctccagcattagtgacctggagcgagaacacccagccagtgagctgagtgttcacacacagagagtttacacactctctgagcaccaacacagtatggcatgtggtcatgcaacaactaaaaataacatttttttttagtatcaactatgtgccagcactattttagccactgaagcttagaagattgtaaaaaaacagataaagttctgttctcagattgtttatagcccaagcgaagttcagttagtaataaaataaaaacatacagcagatgatcataagaactaagaggggaaagacagagaagtggaccaagagtgacaacatttgaagaagggtgtgtggtagagtgggtgagaaaagtctctgactcatttattcattgaacaaaatgtctcaagtacctgctgactcagactgtaacttatgaagggggtttaattaagaaaaaatagatgaacaatcattatttgttatagtaggaagactgtagtaatttaagaaaatacttatcttattgcatctcacatttttgagtatccaacaaaagacacttcgcagtgtcttacctggaaggaagattgttttatgctaagttccctgggctctggggccctcttcctgctggtgagctctgaccatcttcaggagcttggcatgtgctttgctcttggggcctctcagctgggaaagatttgcctctggtggtagtacaggggtttgtctgctggtaaactgcttttctgtctttttcttgatgcattggcttcctgcagctcttcttctgtcttcagttgctagcagaagaggcctcacagtccctctcatggactggtctgtgatagcctttttagctgagtgatggggagttccacccttttgttcctagctcacagtggctgctaaaggcatagcaacctctctgagagcagagtctagtgtccccctcactttgccagcccttctgtcctttgagcatgtcatttcttgagggaatcaacatgtgcttctgtaatgggcagtgttcatcagagggtttgctcccattgctcaagagtagagatgcttcctcccagggctgacttcccataggtattttcctgagtctcagtgattttgacccttgattcagttaggtaacttatacctatgtctgctatatccaaaagttttctagaggagtttagtcaagtgattctgtctggcttgtgccttggtacatgaccagcatgattaacgtgcctcatcgcaacactgggctcttccaacccctgtttagggaaggagacttccttccttgaataactaagggactagttattcccagcctactccccttaagctttggagagcaatacacagattaaatataaatagtagggagcagagattctccagcaatctcccatgaatattttcaccacttttatttatttatttgagacggagtttcgctcttgttgcccaggctggagtgcaatggtgtgatctcagctcatcgcaacctccgcctcctgggttcaagcaattctcctgcctcagcctcccaagtagctgggattacaggcatgtgccaccacacctggctaattttgtatttttagtagagacagagtttctctatgttggtcaggctggtctcaaactcctgacctcaggtgatctgcccacctcagcctcacaaagtgctgagattacaggcatgagccacagcacccagccactttcaccagttttgctagtgaaaacgcatataagcagggagcagtgcctcacactgtaatcccagcactttgggaggccgaggcaggaagatggcttgagtccaggagtttgagaccagcctgggtaatatggtgaaatgttgtccatctctacaaaaaatataaaaattagctgggcatggtggcacatagctgtagccccagctatttgagagactgaagtggaaggattgcttgagcttgggaggtcaaggctgcagcagtcatctgagatagtgccactgcgctccagcctgggtgacagagagtgaccctgtctaaaaaaaaaaaaagaaagaaaaagtacacacacacacacacacacacagaaaaataattttattgatatgactctaacgagtcaatagataaatataaatcagttgtctttatcttagatgtattattattttcaagtgcttgtttattattatgatcaatggcgtttctatagctttgctatttcttttcttgttaaacctctgcttactaatttctataattggggaatcatatacctgttgtagttagatgctcttgaattccaccactgagaagtgaaggattttaacaaaaattgacaaaatcgaatccagatttcttcacctgtcatcatctttctgaaatagcactaatggagatgctcagattttggattcatccaataaatattaattgagcatctactttgtgccaggcaccattctagaaactggcattcagctctaagtaaaatagacaaggtacttctcaaaggctgactttttttctgtttgaaggcatcagttgcaatacattatttacctcttctatgtctttgtgggacataatagggttatagatatacaaaataaaagaaaacaacttttcagactggaaactgagttctactctgataatgctttatactatgttgaagataccacctcatattattttggaagcaggtgggctgtacatgttgaataaataatacattaaagtggactgaagacccatcttttgatcaccagctcttatctgaaaagttaacattactactgcagtttccaatatgagatattttgttttcttatacagtttcattgcttctctgcgcactctgctccccattcccctcataccctaggtatgaggtcttcaaaccagactgcatgttgggggatccggtgtatgcccactgtgcttattcatctttttatttttattttttttttttaattttttttttaatttttttttttattatactctaagttttagggtacatgtgcacattgtgcaggttagttacatatgtatacatgtgccatgctggtgcgctgcacccactaacgtgtcatctagcattaggtatatctcccaatgctatccctcccccctcccccgaccccaccacagtccccagagtgtgatattccccttcctgtgtccatgtgatctcattgttcaattcccacctatgagtgagaatatgcggtgtttggttttttgttcttgcaatagtttactgagaatgatggtttccaatttcatccatgtccctacaaaggacatgaactcatcattttttatggctgcatagtattccatggtgtatatgtgccacattttcttaatccagtctatcattgttggacatttcatctttttaaaggacactttcttccttacacctgcaccgaaaccggcagtgacattccatctatagaactggaggaggctggcccactgtcttctctctcctccctaaggggtattttactgtatttttgatctttgtctaggtttaaagaaagtacagaagctccactgtgaactactttaatacttgcacattttccctaaagtcaattgccatggtatcaatgatgcttaaaaatagagtgaaattttgttatgtgactttcacctcaataaattattaataaaaaataaagtgggccataagtaggtacttcccagattttatttatatttatcaacactttattctggttcctttacaggctgtagaagattctgataggcatgaaaactacaacatatttaaaaaaacattgcttaggatatctccggcctttcaagtttgttctcaaaaataactttgcttgatcaaatgaactatattttggtttactaaagatgttctcagaaagaagaatatgtgtacatcaatgatttgtaatgcatttaaaattcaatactattttttaaaaatttaagtattataatggtactatttatagctagcagaagtagatatagggccaagttttaatttgcttggaaggttgaggcattcctatgataactgggaaaagtgaaatgcattgaggtatcccagatgaatggatgatgttatttttagttctgaaagttagccattcatggatttttgcctagagctcttttgtaacatattgaatgcaaatgtttggacattttagaataaatcttaagttgtccattcctcctttccccaaaggaaaagaagaccagagcaacaatgttggatatttaagtaattacttcttatttctggctttcttatctgtaattcttaaatatcaattaaaatcattgttcattcatctaatggatttagaagtttcattagtgtcaacaagttagtgtaatggtactcttcattttttccaaccaatattcatctgagattttaatgtttgtttaaaaagtagggatgtcctacaccttggtttcctttaagacttcataaattgcagagctctcaaacaaatcagtcagtaaaaaatattaagccataacaataaagattcctgaaaaacttatggtaactcgtaatgacacccttcctacctataatgtactgcactggaatgtcctctttacttaattcgcagatatcaacaattctgtgtaaaaatgaaataactttgaaattccctcagaaacattagagttcattacaaagcttatttgtggcaagacttagtttaaaaactaaatctatctttagtgacatttatgagctgactttttagccattagatagcaggattccttttctggacatttcatcttaactcacagttttagagtgttgtccttacttgaaaagaagagtgtaagatcaggtgtctactgcaaattcctgggaagttatttattgttaaagcactatgatgtggtttaagtgtattttcaaaaggattctatgtgggtagacacagtatccttccgttcagtagcatttgtatagtgcttaacataggcactgagtatttttaagtgaataaatgaacgagaatgctgatgtgaagccttatggattatctactacaagtaagtccaagctattccaggtcagccatgcaataaaattggacttggaagtaggtgggaggggagaagagttgaggtcaaatacaagctgggccactgcctccctcactcgctgtatgaatttaggcaagtcacttaacttttcagggccagggctgtcccttttggaaagtgaaagtattttgctgaatgtgctgagtagtctggtttctctgggcttgaatgtccttcatcttaagtaagcgcttctatttctagtggggaaagggtcaaagcgttctcagaacctggggttactccacatagccagttttgggaaatgttctttttctccttgtcttaacaaaatacacaacaaaatacactcccagtccacttacttttatactgtactgtgaaaagaattttaccaagaaataacctgcagtttaaggaatattaatagaatcattagaaatacaaaagaaagacacacaaacaaaatccagtggtgtctagcttcaaacccagtattaacttaaaatatttttatttatggatgtctctattcaatcactgaagtctgacctcttcttagcctggtttatttccttccctttcctcccctctcctctttcatttcttcatctccttcccacatccctctcctctcctctcctctcctctcctctcctctcctttcctttcctttcatttccctgcgtctgtttctttactgctatctggaaaaacttctattaattgtcttttttttcccaactaatctctaaaatttagttttcctaaatctctaatgatgaagtccagcagtttctccaggatgagctacatgcgtgtggagtactttgagcatctttttgggtatagtcacttatttgggtacctggctcttataagactgtcttcacctctctctcctaactcttgtttttcatggttctccccgtttctgctcactcctgcttcccttgaatttcttatacttctgggttgtttaagtgaggtttgtctcacaatcttggcaccctagtctagtcttagcctttctaaaaagtcattctaacatagatgctgtgttcagaagcttaaattctgattttttagaaaattgaagttgcagatgctttaagaaattgagagagagagaaagagaaagaggagggagagaaaattgagagccctttctttatccttgtagtttctttgtttatatcatgtagactctcagcttccttctctttgtgatttccagcttttcaggagtttcatccccctactccttatgttcataaagaaaagacagagctctaaaatgttagctttcttgagtcactagagagtcttttgtggacacctgctccttctgaaacaattgacttgtctactttcacaaacagcagtatttgtattaaagaaccagttggcatcaatgcccaagtgcaggtgtcctaatatataagatggtgcttcattcagaaaactcaaggtagagtaaaataaattatcaacatcttggctccatgctccattcacaactgttaattttacagggttatgcttccatctctgagcagagaactcctggcagggacagctgctcctgtgtctcacattgggctgtgctcatcccagtaggagtcatcaagagcagcaggttagcgagaaggtgatagtacatcagagaactgagcagtggaggagggagaaggatgggcctctccaaagtgcttttcatttactcctttaatctttgtgtgtatatacatgcatggttaactaaggaaaaaggaaaagttgacttgaatttgactgagaaaattatcagacctgcttttacttgtacatgtagctcattttcaaaaatacttttgtgtatccactggtatgttgatggtcctatgcagcaataggtctgtacgcttgtccaaagaatgtctaacagccccacatcatgattagcaggagctgggtcactggggcagagctggtttgacaggtggaaaacttgtcctgagtagttctgtattagcttacctcctaaactggagcaaaggtcaaggccaatccaagattgagaagaggcgccgaacatgttacatggtaaacactcttttattagtggtcttttgagggaaagttgctgtgttgttctttgctgttatttctgctagaacagtgttcacaaaagtgaacaaaagttcaatgctcaagttaaagaaatctaagaatggagactatcagtagccatgttggggcaccatggtaaacaatggaactggataaaattttatgtagttgcctacacaattctttctatgaccatacctgctgttcctatcctctgaattaattttcatgtggaaaatagtcatttgcagcatatattaggctacaaatgttgccatcaaaaggtaacattctatatgctagtctcttgtctttagtactaagatggctctattgatgataatacgaacacattttaggttcccaattgctttgggaataaagaattgtgacttagttaatatatgttgctttttcaaaaggagaaacagtgtttcccatcattttttaaaattcaggaatagtggtcttttttaattcagattttgaaggtttggtaagtttattgctaatgttggaccacacgcaagagaaagttagacattattttgtgaccagcattgttaagttgtcacattctgaacaaatcccttaaagacctggaactcatttacattttgcataaaatcctgatgggatttatggtttaaactttgactatactctttgtcttgaatttattaatttccttatcaggcttaaaacttgggggaaagtagacttttgcaaaatatttttttaaaccattaagttttatacaaagtccttctcaaaaaccctgtaaaccctctatctttcagagctctttaataaaaacctggggtgaatgtgatttattttttgcttttgtttctggtttgcttgcttttttgagacagggtctcaatctgttaccaaggctgaagtgcagtgacacaacaacagctcactgcagcctcgacctcgcaggctcaagtaagcctccttcctcagcctcctgagtagccaggaccactggtgcatgccactacacccatctaattttaaaattttctgtagagatggggtctcactatgttgccagggatggtctcgaactcctatgctcaagtgcctcctgccttcacttctcaaggtgcttgaattacaagtgtgaaccactgcacccagcttgtaaatgtgatttgagttgtcaaagtacttctaaaaaaaaggctggtttaagtttgacatggagcaacattgagccggggaaagaaaatacgtagaaaataatgccagtggccagatgcggtggctcacgcctgtaattccagcactttgggaggtggaggtgggcggatcactgaggtcaggagtttgagaccagcctgaacaacatgatgaaaccccgtctctacaaaatacaaaacttagtcgagtgtagtggcacatgcctgtaatcccagctatttgggaggtcaaggcaggagaattgcttgaacctgggaggcggaggttgccgtgagctgagaccacgccattgtactccagcctgggtgacagactgagactctatctcaaaaaaaaaaaaaaaaaaaaaaaaaaaaatggccagtgattctggaaggtccgaaagacattacttttcccatacaatactgtgggagaaagatgaggcttgatttgaacttccagggtactgttgaattcttaactccaaaaacagtgcctggcacaaaataaatcacttaataaatacttgttgaatgctgagatttaaaggagaagaatgtcattgaagccctctcttttcccttcttttctcgacaaaggttgaaaaaaatgatgacgaccaaaagattgaacaagatggtatcaaaccagaagataaagctcataaggccgcaaccaaaattcaggctagcttccgtggacacataacaaggaaaaagctcaaaggagagaagaaggatgatgtccaagctgctgaggctgaagctaataagaaggatgaagcccctgttgccgatggggtggagaagaagggagaaggcaccactactgccgaagcagccccagccactggctccaagcctgatgagcccggcaaagcaggagaaactccttccgaggagaagaagggggagggtgatgctgccacagagcaggcagccccccaggctcctgcatcctcagaggagaaggccggctcagctgagacagaaagtgccactaaagcttccactgataactcgccgtcctccaaggctgaagatgccccagccaaggaggagcctaaacaagccgatgtgcctgctgctgtcactgctgctgctgccaccacccctgccgcagaggatgctgctgccaaggcaacagcccagcctccaacggagactggggagagcagccaagctgaagagaacataggtgagcaaccgcgagggtcagatgcaatgggtggatggggaagggagttgctattcggaagaccaggccacctgggtcattgagggagaggaaaaagtctagaagatgttttccagaaatcaagggaagctgtgcttaatttcccaaagtggcaggactaagagctaaggttacattcccaaatatctccagagaggactaccagagaggactcaggcaggtctatgtagcagccagtactagaaagatctggcaattaccttaattggattgatatatgcagtcaaactagataaatctgctttaaaaaagtattctgtgtgctgatagacttagtttaataagtaattactgaggctacatatattttatggatgggaattagctaatgtgattatttggctctagaaaatgcctggtataaatacagccatcctcttcttgatccagattatatagtgtgtgaattgttggcagcaaaagtataatctcagaccacccttccctatctcacattatgtttctgggcattctctccaccatcggttggtgagtagtgtgtgtatatgtgggtatgctcagagaatgttaattgtaacattaattggggtcaaacataattaggaaaataagtctgtcgatgttgccaaaaacaaaagaaaaaccccaaatacagaatatgttgtgaagtcaaacataaataatcattttattattgaagacacgactttctacaatatgcataaataattgagggttcctatgattacaaaaaggtactggattctcttcagtttggagctgtaacttgcaagttggagggttttcactattactgctcaattgtgcagaattggaatagaatattcccagagcaagataaattcaacagagtttcgtccctggagactagatccttccctcaccccaacacatccacagtggtaaaggaggccaacagtttccatgatctttctctagtctaatatgaccgataaatactttccagccccaaagatcctcaaagataaagtttcttctgtgtccatttaaaagattgggtttactcctttagaagcgcctcggtttaaccaatgatgtttgtcatccaagggtccaaatacggactgaaccaccgtgtgctccttgggagaaaacctactccatgagagtggtctgaggaatgttttggcatctgaccatcagattgagaaagtaatgactggacttttaccttgatatacatttccccaaaatcagatactacaatatggtaggtgactattctagatattttaggtctacttctttcatcgtatccctaaaattctatgaatatgatgccagattatattaattaacattgttattggcatattccagctctggataaatcgtatgcttcttttcattttgaatctttattctaacacacaactgtcccaggggccagacattgaggtttagaagatgggaatttttccctggaaaaggtaaggcatgtgataaaaagtggggtgtgggttttaatttactcagcaaagcaaaacttaactacttttctttagatttaaggtttgagcctcaggtatgatgtctggaaatcactttgcatatccacaagttacttaatgtgtcattttcatacatcttagaaattaatcatgcttttaaatacagaacatatctgacatggcacagaccatattttttaactgggatttctaaagttgtgggaaacagagaaatgatgtgattttaggtatatgcttatgatttgggttgatagaaggattttttgaatcagtaggaagtctaatatataatatattttaaaagaaattaagttttattatgtttcaggttatgataactaactgcaaatgaattaatgaaatattttatgtagtaagttgtcaacaaatgtcaaatattgaatataaattgatgaaatttaaattatagataataatttgttcactcatttatatatttctcttgcatatttgcttattctattcatttatttgattaaaaatgtgtctggtcagtgaaagcaaacagcactcttctctgccttaaatgttacagattctgacagaaaaatatcttaattaatcagactttatcatgggcattcaaaggtgattgaaacaataggtgaagttcaacttgaaggtaatcacaaagggcaatttacagtgtttcttagagttgggtaggtactgtcctcttggttagattcagaaatgctgcctgtcgtttctttctgggttgaggtatctagtagccttgcctgctcttatgtgacaagcacaaattactccactgtgatgaatctcatgggatcacagaaggtagaggtgacaaggagatctatcacatcatatcaggtccaaattcccaggtgccctgtactgcatttcctctgccttccactgtatttcattttaacctgggttaaagtagcagcatcttccactgggctgtactgttcggaaatgggtggctaccatgggttgctttaggattctacagctgcctggaggggcgtggacagacaatctaagagggtgcaacagggttaaggggaaaaataggtacaaagagaaaatctaagaaaataatttctgtgaatatcaggcttaaaaattttagatatgattattactttaatacctatggaaatgttgggggaactataaatgttatttattttacttcttttactatttactaccaacctgtttgttatggggggatgtcatttgtattttgatctttgaagttggttggttattgtcattgttttaaattctccaagtatgtccacctctccctagtttgccacgctgcctgcccagctttttacgtgcctgggaccaaaacatttcagcgcacctctgacaatgattcctttagaggaagaggagtgttcaaaacatctgtgggacactgccccattcagtcatgagtagagaactttgaagccccctttagtgattatatccttggggtctcctgctgagcagtgtcactgtgctcattggctctcaatgaaggaattctctcttacgtctcctcttctccatggtagcctattgattttccccagtagaggactctgctgtggtcatattcagtgatgtggtacaaccaaggtaacctatccagagggctatcaatcagtgatattgattgggtggctgccacagggtctttgactgatgctagttggaagtgtagctctgagtgactttaaatgttctgtatgttgatcttggctgcattttattttcatggtctcagtacatcttgcaaattgatgccatcagtaatgatcaagaaaagagggaggagtttcctattgccattccctgaaaagaaaaattaacttagtgtctccctgcttctcttcctcctcttttttatccttccttcctccctccttccttcccattctgtctccttcttttctattcttcctttctttttcccttccctttatattaactttcttctgtgctaggtattggagtcacaaagatgaataagatatgattttttggccaggtgcggtggctcatgcctgtaatcccagcactttgggagaccgaggcaggaggacttgagtccaggagtttgagaccagcctgggcaacagaaggagaccccatctctacaaataataaataattagcagagtgtggtggtgtgtgcctgaggtcccagccactctggaggttgaggcaggaagatcacctgagcccgggaggtcaaggctgcagtgagccattattgtgtgccattgtactccagcctgggtgacagagtgagaccctgtctcagaaaaagtaaaccaaaccaaaacaaaaacaagatgtactcttttgaccttaatgaattcttacttggtatgggggtagtatgaaattcagggaatgacattgaaaacaatcatattcataatctcaattaaattctgcagttaggtacagggcacttccctatgccaatgcactttggacaaaatatgaatgaggcagtgcttcaggggctaagatgcagtctgctgcttactataaaaacgttgcatataatgtatgtcctgatactcaaattattaacgaaaagaatagatgcaaaatttagaatttctagaatgataattgtgtataagaaaatgaaatacccagctcatatttctgaatttaaaaaattatttatgtttcccagaacaatattttccctaagacccaaggtaaccatctatttttcagctttccaaaagataggtccacttctaccaagctgtgtgttagatgtgagattttccaaggatatttacacttatttggcagggtgcctcgtgagcggctttgatttgaaatgtggtttcaaccacttcctaaatttatacacaactcacaaagaatgaaaattttggttgtggaagtccataaatgctgtttataaaacatgggcaccctgtcagatactcagtggtatacctcttaaatactgttgattattaagcttttatggagcacttttatattgctagagtaatcatttttattggcttttcttgacaacagcccaatgtcatttgataatatttttctttctatttttatattccaagaatagggacaaagtaaatggatattctggccacaaatacagccagtgacaaaatgaggatcaaactgattgaactctaaatcctcaccttaactgtagccctacagttctttctctctattaaggtgttatgttttgtctcagtttctgcattttcttttttatcttagctgttgttgtgatctgatgcttttgggaaataccaaccaggaccttactaggatattctctgtcctacctgccttgtaatataatgcagggaaaagatctttgaactgaaataaagagaccagggttctagtctcagtatttctaccaaccagattttaggcaagttattgcttctctggacctcattcatctcatccttaggaaaagggactacgatagttggtttttaaggttttctttcaagagttaacatataaaagtctaataataggtagcacttaatgagcatttattaactgccaggtcctgtgctgagtgctatgtggggattgttccatttaatcatcataaccactctgtggtagtaatgtagtagtgtaattttcccttccctttttacaaggagaaatcttagctttagggagactatgggacttaatcattgttgacagctagcaatgttgaaccagaagccaaaccctgagagtctgagaggtcacatgctgaaccctgacacttatccaagtgctattctggaagaaacaaagaggagaggaatgtctaaggaccccaacaatgtgttataatataagaacatctctcttctttggataattggatattccagactcttgtctgggaattattagggatagcatttacagatgggtgtctagtaactactataattcctgatcataattccctcacagccctatcaccccagaattattagggatattaaactgtttctgagtcttagattcttatttcaaaaatgctccaagtactgttttattagacctgagagagctataaagatcagctgaaaatgattgttcttaacagatgtattactgactccatcaaatacatcagttatgccaggaggatctgaaaactagaaatggaaattttcatatctcaatcagatgaaagtcattttatttattgtaggcaattgctaccctaagtttagcttatcagaatcagtatcttttttatattcttgcttaggtctacccccctttggcaagtgcatttccaaaggatctggtacctttataactaaaatattaaagaacttaatagaagagacaaattaaagagcaatcattaactcttttttgagacagagtctcgctctgttgctcaggctggagtacagtggcacgatctcagctcactgtaacctctgactcctgggttctagtgattctcctgcctcaacctccctagtggctgggattacaggcacctgccaccatgcctggctaatttttgtatttttagtaaagacggggttttaccatgttggtcaggctggtctcaaactcctgacctcaggtgatccgcctgcttcagcctcgctgggattacaggtgtgagccactgcgcctggcccttttattaactctttagttaaaaaagtaagcagacaaaagacaagatgaaggaatgtgttgtggagtcacatgactcatattgttgaggccattcattcattctttcatagcttttattaaattgttactgtcacctcataaaagaatctggaaaacagacatgttcttcccccaattttaaagttgtgaaactacatttggaactaaaaattaatatttcttaaaatatagactattattcagatattaacacacattcataaaatatttttcttttttctctacatacatgtgcgcgcgctgcgcgcgcgcacacacacacacacacacacacacacacacacacacacacgacaatcttgcaatggtagaccaaggaggcatctttgaagtgtgggacatatggcttcttagccaaccatcctcacttttccatagtcccttattttcttaactattagataatgggcttaagggatggggttgatagtagagaagtttagatagaggggcaaagaatctagaagagtcaattctaagaaagtttattattagactagaggcccagaagacagcaagaatatctcagtagaggtttctaatcccgtcttacacttgagattgaatataaagagttgaaaatgatgttttctgatatgactggacttctgattcataatcctcctaaccctgtctctggatggaaaactatagctataatagctacagtggctatagcctatagacagccataatttgctatcaatagtttcatttccatcttacacttaattcaatatcagtgtatttttatatgcttttatttcattaaagtaattaaacagcttcaagggttaataaaaccttggatgcttatgtagagcaatggatacatctgatagacatctgataagctttttaaaattttgtcggtagactgtcattaaaacataaagtattatatggataagctaatacaaatctcttccaattcttttttttaaaactctacattcacagtcgttggatatttgaccaatagtgaaattaactaacaggcctaagtatttgaaatgggctattgaacgtcccgagaaaaggtggtatggaagatatacaagttagatgtgattactcagcaatcctcacacttatttgtaatcaccaaatcacaaattagaggattatgagaattaaaatatttcagtttgatcatctcacaccattctacttggaagggaaattgtagttcttaagatatcttcaggggaagaaagtattctaggaaggctttttgcctttctttgtaaaacatgttcaacataaatattctatcctggtggcacatatacagtgaaataacttttgaaggtttttttttcccctgttttattttgtttttccagtatgagttagtagaatcttttggaatttggaatagaaaccagaagccatttacttaaaatggtcccttcttactggtgcatgatgaatgtgtgtgtctctcagataaagtggagatgaacatttctatagccttgaaaaaaatgttctcttccctggtgtatgacaaagtgaaggatataatttagatatgtttaagcactgtatccatgcctgtagtatacccttctgccaatttccaagcacatatgtatacacacacattcaatatgtagggaaagggctgcccaagagttcagactgtagggaaaatctggaagaacggtaagttccacattttcttcacccttcagcccaaaaagaagtagagaatggctccaggaacaccctttgtctctctgagggtgtgtgtgaagagtaatggtcgtttctcggctgctcatgtaatcaggatatgtttgtgaacctacagtgggttgaggagagttaagagttgggattaaagctatctacgatgaaatttatagtgcctaagaactaaaaccctggtttggctaattaggggaacattatccaggaagagttcttggtgtagaggttgcctcatctgaatcttaaaggataaaatttatccaatgaaaagagacgtcatttatttaaaaacttgagacaccacctttcattcaagttaacacacatgtataaataaattgattcaggtcataattctgcagcagctttttaaccttcagtggaaaaagtagcttcatgtctgtgttgtttattgttgcttttcctgcatctgtgacaatactttgaatgaataatattatgccttagagaaaatcctaaactgacccaggaaaatgaatacagaagctcattggaaagtttagtgttactcaggcctgtaagtcatccctgaggttgccagaattcaaaccatttagggcttcatagaccagtgtgagcattttgcattatattcagaaacatattgagaactagaggaagtcaaggctgctccctactgaaagcaggtgattaatttcactccagccacatgaatgacctgtgggtggcccttgctagtgtgtgacagaaacacccagggaagaaatgatttgccaggttccttggcttcctttcctcatctgacacaattaagtaatctttgcaaggtgtgtaagagtctattgaacctgctgttgctccactgtagggtgaattgttattgtgttcccaaaccaacagtgttgggacacagaccagtaaacaggctttcccattccttaatgcaaacataatttgtgtacagcctgtgagctattcagattacagaccatgagggacattgcagtgggaggctgaaaggattcttccctacacaaaaactgcaacttaaagtcaccctcatgtatttggtaaaaagacagaatgtgccccactttgtgaaattctattccagtttaaagggctaagaaagcgcagagttcagtaatgtggcttcagtgttctccccattggtgtaatcaaatccttttagaaggaaaaccagcggtggaagattttttttatttcctccttcctcttcctttgatattggtggtttaattataatagattcataagagaacctggcccctattggaagatatgttagttttctttttcttgccaccaaggtgtaaaccattcattatgattttatcagatatctgcagcggcatgctggtaaactggctctccaaaaaataaaacaaaactctaacagcctttatttgtagtttttgccaatttctatggtataaatactcccatcctagctgatttcaggctaccaatgtgtaatctccaaataagcagttgggaagaagtgctaatatcttgctgtcagcagccaatgttagtcagctccagcataccccagatcattatattttagcaatttgattaattttattttgataattctaaaatactaagaatagtaattatcaacttccaaataatgtatcagtgtagaagcatataaatatacatttgtaaaaccacatagttatgtacatatatatgtgatggcatgagaagtactttcaacattcgcagtcatttctgttgagcattgtacacttgctaaaggttaaggaagaaaagtaaagtttagaattggtattcttgtattcaattagaaaagcaattgctactgaaggaatttgtacattgtcctcaaaatttgatctgagctgtatctttttaatgcattgaaaggcttttcatctttttttaaaggaaagtgcataatttattatatttatgaggttataataaaatggatacttaggaactttaaacatgagttaaaagtaatcatcagatataaaattctcaaatcttggaacccaaaatactaaattttagaattttcttaaaacctctttctcatgattaacttagtttgaaaattattatgttctttcataagaaaagaaggaaaatttaaaaatagacatgttgatggaggcaatagttcttctcagctggtttttcggagatgatttcagggttcagattgatttgcaaccatttaacatttaatgcagaggaagagttgactatttccttccctcatactaatttttagtgagaaagatgcttttcgtgctaggaggaacattgtgaaacaatgtcttcacagaggtagaatcagatgagtaagtaattgctgaaggcagacattttcaaaattgttagcctaggcactatttgctcaaatgagtttaaaatatatacactaaaccccaaagcagagaagctttggttgagaatgataggggaaagtggagatgactgaagatgtcctgaaatcccccctcttttttttttttttgcatctatccctaccctctaggtagatcatttctgagccttgaagtacagtttgaaaaatgcaaatttcagaaatttctcagctacttattgtctacatgtggacagcaacaaaagagtcaatgccaatcgatctcatttactgtaagctgatcttcacaatgagtatggataactgcacccatattgatgatatagtagattttgtgtattacttataaggtcaacagaaaattgattcatattacagtcctattgtgtagtcgcagataggactggtgtgagtaacttctaaacatggctttaggcaactaaccactgttccatttaattttagttccactggtattaaaaccatgcagaatttattttctaaatgatattttacaaatcataatcccaaagaaaatttattttctagaatcctcaatcaatgaactttgagttgtgttgctggagcctggagttccatggagcagcatctcagcagtagtttctgggaactgcggttgttttgcagaggccaggttaacaaggattgggttcctaggattggggtcctatctcgcaatcccctacacctctaccaaactatttcgtgatcttggttaaactttgatttgacattttaactaataataattaaaaattactgttttaaacttaagaccaaattcaaaaggtcttcaatcttggcaagattaaaactcaacataattcaaaactcatcttttcaggcaggcatccaatctgtacttagcttgaattgtttattttacaaacagatactgctcaaattctaaaatttgacttgtagtataaaccataaaaaaatggaatttgagtgactcacccagggttactaacgaaatttttttattatttatttatttatttatttatgtttgagatggagtctcactctatcacccagactggagtgcagtggtgcaatcttggctcaccgcaacctccgcctcccgggttcaaccgattatcctgcctcagcctcccgagtagctgggattacaggagtgtgccaccatgcccagctaattttttggatttttggtagagatgaggtttcgccatgttggtttcaccaggtctcaagctcctggcctcaagtgatccacccacctcggcctcccaaagtgctgggattgtaggcataagccactgcccctggcctcaaattattaaaattattatatccatgggtactttaacttaaaaaataggctaataatgcagtaatattttttagttatactccagtgtcaacataattgtataaataatgcattccttctgatgggatactatttaaaaaactctatctatacaattttggaatatccacaaaaataagatttctagaaggttaaaggccgaaatcagtctcaaaaattctaaaaaatctgtcgcctttctttctcccactccttagccctagtggacgatagctgtttgtgcctctgttgaagcacgtgccccaaaaggaaacatgcctgggcaatggggccaattcttatttaactccgcggactgacatcctaaatgcctcttcagtgattaacatcacaacgtgacacaattcagctgggtaaaagggataggtcccataatgccatgctcactccttataaattcaagtagactacttgaaaaaccactcatacaaagctatgaatttatacctgtccatatcaatgccccacaaaaaacctcccaatgcttgcctactttttgcaatctgaatacaatctaacttacttccgcagcctaggaggcctcatatgatctcacgtcttagctttctgatcagatgtccttctgctcagcccttcttccccattctccagccctaatagctttcttaaggtctcttgaatgtatacagcttgctcctgtcccagggcctttacacttgctttctcccttgagcttcccatggtcacctcttagccctggcctcttggcactcaggtctccatttgaatgtcccttactcagacaagtcttccctgaccatttgggcagaacagcactgcactacccctaccaatgccaacagttacatcacattacccagtttattttctccgtagcattcttagtgcctaaaacgactgtgtttatctgtgtcgtcctcagtttctctccctctcagtagacttttcatttcttgaaggctgcatggtagccccagtgctcagaatagagcacagcacatagaaggctctcaatagacatcctctgactggccaataatatggattgcacctatggagagatttcttttcataaacagcttgaaagggaaagaaccatttaattttttaaatttgaagccccacaagaaaagctaagagtttttcaggcaagtgtccatctttattgcttgcagcccagttctttggaattttatacatcagcaacttcttttccatgacccatttctaaatatttcctaggcacccagacactctgagtctgaatgaggatatttgattgagaaggaaaattggtcagaatgtgaaaaaggaaggtgggcccttaggaggaacaaggtggggatgtggatagagattctttacttcctatagagaaaagggagagtaggagggaagaataatggggtagaaaatggagaaaaaagtgggaggaaaaaaagcagaagaggaccagaaatcgatcaggggaggcagaaagaataagcaagggcaaagtggagaaagaatagatggtagaaaagagaaagaaggaataataggcgagaaagcaagaggtgtgggagaagcagggctggaggggcgctgaagagcaggggaaggcactgactgagctgagtaccaagagacagccgtggttttcttgtagctctgtttctgacaagctctctggccatggccaaggccaatttaccttccttgctggtaaaagatggttttatgggatcttccagcactagcgctctctgttcttggcttcacaaacagcaggccctaaagggttccttgacaaatggattttctgtctttgagcagatctaagtggcagatggggcacagctcccctaggagagacccccccgccaccccctgcccaccattgtctgagcccttctgcagcatcagtccccagccagcgctgcctcaacaaaccaagagacattgtctctgcttgcttccagacaggaaaagaaaaggattgagtttcataatctcacaattttaaatgtaggcctatttccataagaagtttcagattacaaggcatgtttcagaaacatttttttactttgaacacctcataaagagacagtcttggaactggacagtcctgggttcaacctcaggttcctcactgcatggttttaatgatttgtataaccttcagtgtcttcatctataagatagagattaaaatgttacccttaaacagttgtgatgaggatttaatgaggtaacatatttaaagaaccaggtatagagtaggtcctcaattattatcattttgcctaagttttcttctgataatctgaaataatcacttttgatcctcatactctcctctccccatatgaagatcctctgggcaaatcttttttttttttttctttctttcttttttttttttttttgagacggagtctccctctgtcgcccaggctggagtgcagtggtgcaatctcagctcactgcaagctccgtctcccaggttcacgccattctcctgcctcagcctcctgagtagctgggactacaggcacccgccaccatgcccggctaactttttgtatttttagtagagatggggtttcaccatgttagctaggatggtctcaatctcctgacctcatgatccacccgcctcggcctcccaaaatcctgggattacaggcatgagccactgcgcctggccccctctgggcaaatcttaaaattgaagatggtaaaagcatggataatctgtcatcttcctacaggtaaaatagtggaagaaattacttcatccagcaaataaagagaacaatggtttcttggtgacccaaagtaaagtatttcagagtactattttgtattcgaagtaatacaaaagacaaatatattattcagtggatactgcaacaatagacagaattgcaacaaacatgaatttagccaaatctcttgcttggaggcctgcagtggaggagaaatatcagagcgatcttggaatcggacctatctatgtttgaatcaaaggtccagtccctaaccagctctatgccattaattcagcgtcagctttgtcattgtgaaataaaatatcctcattgctgaacttggtggttgtcggtattaaatagatcatgtgtaaaaggtgtctattatggtattttattgaacacacagtaagtgcctaatagaaagtcaccattgttcctgttcctttcagctgaagctattggggaactttctttttctttggtactacacctgattttatgaaggaaattaacgtgcaaataggacatgatttatggccagcaagagagacacataatgatttgcagtctcttttgggagtcagagtctattctatttggcctaccttgtagctcagcaacattaccaagtccttacattatcagtaatgattgagcctggaagtcagccaaggttaccaggtagtgatgttagggttaatttgggcttcatgtaatttgtccctcagaaactgcaatctagggattcaatagaaaaggttgggataccttaagggaaatagctaacacactctttccaggtagataccagctataacttgtcacatcttgtatttcaatcctacagtcttagacctaaaaggaaacttaaaaattgcctaagcctgggaactggatgggcttcaggagggttctttcatctcctaagattatttgcaacatgttatactgtgtgtgcatacggatgatattcttggcaaaatgaccttgtctttcatcagatactctactgggaccactgcgcaaaaatattatgatgcactatgcttgaacaatctccaggagaagttgtgtgtgcctgtgttttaatgaacgatgaagcatgttctgggattcagttgcatggtctggccatggtcccacaatgagttagcatcagaatagaggagataaacccagatatcgcaaggactgtattctactgtcattcaattaatttgtacttattaatacgtataatttccacactacacaggcattgtgagggatgtagattataaaagtgaatatctgttgtcatggaagttacagtctggatggggagaaaagtaaggctcttaaaagaaaacagaaacaaaaaagactcagtaccagtatagaacaaaataagtctgtgactgcttgcaaactgcagtctgtagttgtggcaaaggaattcagagaccacgatagtgggtagggtctgaagaaaagaaatgagcattatgatgaagcattggtgaggataccggccttagtagtttgtgccagtgaggagaaggtagggtatgttggaccttgaagtggtcggaagttttcagtcttggtccaacagcaaatagagggtggttaaagtttttacttcaccatattatttttgctcccagaatgactctgatgtctctatgaagtgtacacaaagcacaatccacacttatgaattcagttcaaagatattaatattatttcagcatacctgttaaagtgacttaacaatctacttgtagactgagtttttggtcatattcgaaggaccaaaaaatcaaaattgatttaggattaacttcaaaataggacccaatcacaatagttgttcctattgcactgctatgcagtttgcctggggtcatttcttcctggagagtgacgcctgacacgcctgccttccactcagcctccacagctgggaacagaattacactggtgccctctgctgggatgaaatgggaagttgatcaggaaacaatggtgtcctcgtcttttcaacatagagatggaggtggcgattccaggcccactgcagcctccaggctggattcatttagtgttctctccaggcctccctctcaggtgtcttctttgcatcatacctgaatttattaaccaaagggagtaattggatttttattgtaagaaggttgtcagctaatttttaaaagtagtccaaggaaatgctgccccctttcctctgacaatttgagagctgggccctggtttcaacacacagggctagtcatcttgggtggtggcttggccgtcttgctagagaacaatacatattaagagccacggggagactctgggaccatttaaaaaaatcctgttaaattattattattattattatttattttaacggtgaggaaagcacattgatattcattgctgattttcttggctcaaataaacagcattaatgctatggtgttaaattcaatttagagtgtctactctggtgtgcctttggtaccctgctcagctgatttttctgctagaggtgaaaaaacattcagttgtaattaagaaaggggtgggggagtgctgagaaggaaaccgaaagagagaagagttgtgaagtctcatgtgtgcaaattggtaatggacttctaaaataaaatgatgggggctggggcggggcggggcaggggagaggatggattgaaatgatcctttcctgctccccacttttattttattttattttgtttaggatcaataatttggacatggaggtctgctgctggtttccataacaacctggcttattgaaaaactgcaggctccacgaatccccaattatcagccttccagggcttattaatggagttgagcatcccagtgaggcaggcagctcattgctggcacgtgcccggtgggctggcggagggtggaggagatgggaagaggagatgtgtggtgagacagcagccatttgtccccgtcacttgcaggggaggggggagcagtcattcaggaggctgtgagagcgtctcttgaaaccctgagtggctgccgctgctgttacaggcagcccagaaatcgaagcatagcttgtttttccagctccaccccgaagccatctatctggaataaatccttatgaatatatcacaagccctgtatgtctattgagcttctataattaatcgggctttcctcacaaagacaatggtgactctatatttctaatattaactcaagccttaattaaaatgtgaagccaacctaatgcatatttgatagctttgaattactcagtctttggtctggcttcacttattaggccctcgccatagaataattacaatagcaacaataataccgatgatgatcaaaatacagataacatttacttatcttgtgccaggctttctgctaaaagctccacatggagtttcttgtttaagcttcacaatgatcctatgatgagggatatcactgtcccttttttacaaatgaggaaacagaagcaagagaacttaaatgacttatcttaggccacagggctagtgagtatatcagagtctcatttctgctccctttccataattattttttatttttcaacatgcgtatcctcaagatagaaaaggaacagcacatttacagtaaattttgtgctatccagtgttaattggggaatgaaacattctggtttatcaaatattttgattaataattgctattcatgtcatgattgggtttccaatgggaaagatctgggatataataaaacatacacaacattagaagtatagtaatcattgtcataaaatgcttcaggatcattatacaaatgcgaatttttattgtagtgcagaagtgttagttgataaagacttctgtttgacaaaatgccagttgaactgtttttatagcatggaaatatcagtgccttaacacttttgaatattgtagatttcaaagtgctttacataaactaccacagaagttcaatgtgatcagaaaagaaaaattttaggatctttcagagttaaagaatattagtgcttggaaaaccttaaatgcattaaatactctggatccttagactatgctttttaaaactggaaccttagactaactgggaaatggaatgtgacacacccttgaggtggttcaatgcaagtctgtcatcaagcactgttaaaatagatcaacatttccagaaatttcatcacagttgctcaaataacatttattattagtttagtctccagaagtgaaaatagaacttgtttccaaggaccccaactttttaagaattaagagaagtgacaatatggattgtttgttttatttaatacttagtgagcatataatctaagcattttacatgtgtcatccatacacagcaaccctatgaggtaagaactcccccgtttatagatggagaaatcaaagtacagagaacacataacatgcctgaggtatcacatttgggaaacacattcaaagtcaggcagtctagctcctgagtctgtgttctcaaccagagttgtctatactctctccaatttgtttcttcctattctgcgtttaatccacaacaatcacatctacctcctacccactccccaaactccccatccagtgaaacaactttagccaaactcacaaacgacctccacatcgccaaaacccaatggccaattctaaggcctcatcttcttttacctattaacagcatcgcagagttgatcactttctactctttgaaacactttcatgattgctcttccaggatgttgcctattctgattatttttgccaacctactggctagtcccattcagtttcatttgcccttccttctttatttccctgatttgaaatgttgagttaccccacagctaagttcttggatgtcttctcctcttttctcttctacattctctctctctctctttttttatttacatttatgactttggtgatctctctgagctcatctatagcccggacctctctccccactccagacaattgcttactctacatctcaacttggatatctaatagatacctcaaattaaatctcttgaaaaccaaacttctgtcttttttttctgaacttactccttctcccgtctttctcatctcaggaaatgacaagtccatcatttcctgatacttaggccatatgccttaaaattattcctttttttcttttcctttgacaacattaaatctatgagcaagtcttattggctccaccttcaacatatatccagaatctcagcacatctcactttttctagcacccatctcacttcagcaaaagtcaagtccttaaagtggcctcaaagctccatgttctcagcatatccactaggtcaccacttggatttcctctcctgttactctccatttcttggtcctttctagcaatactgatttccttgctgccccccaccgcccccccccccacaaacaggtatgctcatatgcagggaatttgcaacttactgttccctctgcctcaaaacctccctcctctagaaatttatagagttcactctctaaccatcttcagctctccgttcagatatcaccttctcaaagcaactttctcttcgtttaatattgtcaccccaacctcatcccagcatttccccttctctttcccagttttgttattttcagtaatttttgtttgttggttagttttgtttgtttgtttgattttagacagagtcccaccattgttgcccaggctagagtgtagtggtgcaatctcggctcactgcaacctccacctcctgggttcaagtgattctcctgccttagcctcctgagtagcaggcactacaggcgcccaccacacccggctaaattttgtaattttgtatttttgtatttagatggggctccaccatattggtcaggatggtctcaaactcctgacctcaagtgatccacccacctcggcctcccaaagtgctgggattacaggcatgagccaccacacccagccaattttgttattttcatggtgcttactgccttctaatatattatacattacatttatttatttataataataatataaacttcatgaagacagggtattttttgttttattattatttcgtacactgtggtattctcagcaactggaacaagcagtaaatgctcaataaatatcaattcattcaatgagtgaagaagataccaagcacatgtattaaacaggcagttctaaaggaacttcctctccgccacctaagcacatgtttcctcaccgtcctttgtccctgtacattctttggtgactcatagagttctcacatgtaatgccatcctcctaatgaccggaagatgatggccgctggacagcaactataactgggttgtgtctgtggcatcagggcactggccccttgttttagcctcactgcttcacaagccctccttacatggagtccatgccacagggaggaaattgtttcatctttcaatgcaaaggatatagctctaaaagcagagaaccattttagcaaattcaaaaccactgggaattctgcccagactggaaatagatggcaaaacacacttttgcttagaagtgagctgcctttctttcatgttgaatcatcaaatcaaagtcatagaaactttaatgtctaacaaagagtctctggcagattaaaattttccacttataaattatagttaactcagcatttagctattagtaacccttttgtagtatgttaaatttgcttacatattgattataactcaatgtgattggaacgttttcccatgcgggagcatttcttcaaaggaaccactgcataaaaattcacagagtacatgtgcgcgtgtgtgtgtgtgtgtgtgtgtgtgtataaaatatataacatgtatataaaatatatattatatattatataaaatatatattatatataatatataaaatatatattatatataatatataaaatatataatatatattatatattatatattatatatataatatataatatataaaatatattaaataatatatatattaaatatatattatatattatataaaatatataatatataatatataatatatataaaatatatataatatataatatataatatatataaaatatatataatatataatatataatatatataaaatatatataatatataatatataatatatataaaatatatataatatataatatataatatatataaaatatatataatatataatatataatatatataaaatatatataatatataatatatataaaatatatattatatataaatataatatatatatattatatataaaatatatataatatatatatatattatatataaaatatatataatatatatatataaaaccagttctgtcggtcatgatcagagtccaaggattaagtctcatatcatctattagctttgcacaattagaaaatagttttgtgactcagattactccaataaaaccagtaggtcttctcttaagattctaactgtggttggtaagaataaatgcagaacactgtgagacaaacaaatctaattcatacagctgtagacaatctttggtgagaaaaggctgcttatgtctgtggggctatgtttgtatgtggtggaacttggaaagtggagtggaaaagtgtgggtagaggatggaaatgagcacatacttaggtgacaagagagatgagggtgtgggggtgtcagtgctacctgaaaaatcccaatcccaaaggaaagtgggaagggaccagggtgacagcaagcaactataaaactttaaaatctatggaccagaacccctgataataggaatctgtttataagttagataacaaaatatggttgtacatataatgacttggccctaaactggtaatccttcatttcttactcatagcctcagcattcccaccaccatcctccattgttggaacagctgcccaacccttacgtatgacaacagaaaatgggaggagcaggaaggcaggacacctaaggcataaagggctgtgtttcatctttactgctgattccttgtaaaagcggcagccattctcgtggattggaattccctgcttctgatcttatgtggacaattgttgattgtgtctgtctaccatggaaagatttggtttactgaggaagtactttggcattggcaggaggttgatgagaatacaatcattctacctccgctattcatcttgagcatcctgcatcctgacacctgctgagtaagacagatttgtaccttgtcaccacatgtgtgaagtgcacgtgagaaacagtaacagggttaatgccactctcttacaaagagaattttgttttcacttgttctctcccatattgctctaacaccctctgtgccatcgttcccaaccttccttcctcttcccccaccactacgcacccacccagatctcctgagagtcgttactactcagcccatcagccaaagttagtgggtttccatggtaaccaggcagctggtgtctagacactctgagagagatgccttgcaattgagctgcaaatctagcttctatcaaacaccccctctcttccctcctcctctttcctcccatttcctttttatttacagcaggcattaataccaacactgaatggagtttccttttgacaggccattaaaggaagagggggatgagagagggtgaaaacccccaacttgctgtcttgtcatatcagtgcagtgagaagacaaccgaggtgacagactctgatctggtttgctctttcttctttaagaaggattttatttaattaaaatattttaaattaggaaacagtgccactagtctattgggagtcatatgcatctttaagagccagtaaaagcattttcaggatagagcttgagctgatggcactgggttgaggtaaaatttttttcacagtgtctgggcaatcaatgtaatttctctttctatgatgctcaggggaattacatgcctgtagtattactagacaggaaactatgcagtgggatacaggcaagtataagaaagggccttaaatgacacctcagatctggaaaagtcaagtttaactgttccttatttgtctcaagaaagagaaaagcagcttctgacagccaggagctggcctggagctcacaagttagccttagtgttctgttaatataaacaactttgcagaacaccaacatcagacaagggcactttgtgtgatggatcaggacaaaacaagaccaccataataatcatgtctgaacgcagactaaatatgcacattgtccaaaccataaaatgtctgaatatttcctcagcctggccaatatgaataatgatgcttactttattcctccctcttcctagatgatatttattgagatgcctaaaaataaaattacgcctgttttgtgacagcattccaatccagagcaaagttctgtttccctaaaaccacctccaaatcacctaacacctgcccaaataaagccctttctagtcccttcttgtgagacacctcatgattctccatagcatagagtcttcctagctgtaacatgtaaataaacccacctttgctcaactatatgtgtgttccttttagtcttggctgtaagtggttgatgctccatagaatttctctctatattattatgtacactgaagttaacttcagtgaaaaagtctttttcttattttctcccacatctaaatattttctatgccatctttaccccaaatttattgctacactttcctgaattcactaattctccctctgaaatctcataaaaacctaatgtaggaaacaaaattaactctattttttctatctgtagtattttcacatttttgatctcagtaattacacaggatgcctcagggcacagatgagtttataattatctttactactcattgagaaatttattacctgaattagcagtgatgacaaggacatgtagatcagactgacagcagacatcaaacatgacccagtcaaatgacagtaagactatgacaaaatgtttaaatttagtacactttcccttaaatcccaaggaaagctatgttccctgtttcagactaaagggtgtcagataatttgttggggcagcaaccatctcctctcccgttcatattatgatctgtcagctttaagtgactattttagctaccactatccacaacagagaagaagtttggaagaggtctaccttgggaacagaatgatatgttaagatatgactctattcgttctgatattagtatcttctctgccaccccctgaaatgccagtttggtgtactgtcatatatcctctgagcccctctgtgagatcactcaccactcaccatctctctttcaggtgagttctgtacctggctgtggaatcagtatcattgttattccgggggtagggtcatttaaagagccctacacacaattggctcaccaccaagtcaaatggtacccaccaataattggtttcttacttgggaacagttccattaactagacttctgcttggtttacattacctacattcctatcttatctcttttagattctggtttctccaagactaaggcctagccttattctcatctattctcttggagatggtaatcttgttcttggacctataattaggaggctgtattgttggctgacagatttccccaaatgtccatggttgatttacattggacttttttagttgctgtgttctaccaacctccaatgtttgtttactacttctgctgttgaccttctattttactgtttcccataatcataagcctcagacattccaccccgccaacctgtccttcctcccattggctattactggttccatgcccaaattgtagtagtattgctagattcaattctctttgagtctgatatatttaacatcaattgtattagtacagttcctatttttaaatcttttctttccatttcttggcctcagttagagagatgtgcttctgagaaagaagaatcaacagatacaggtgcatttgggagagagggttttaaatttgaatcactgagagaatgttaaggccaatctggttacacttgtagagataatggtcaggtgatgtctcagataaagacataggattggagccaggaatggagtcaagattgtacttacttgggaagtaagaatttggaatttaagaatttaagaagttggaagtagaacttggaatttgatggatatgaacaaggagttaagatttcatgataaagaaagtaatatgcttacagtgatctttaaggattaatgataagacagtggtaatataaatcaggtggttacctggatagaggtcaggattgaagtcattagagggaatgagttttctgatacagagtctacaaggataatattgacttgaatcttggattgaggtcatgttaggggacagaaagaaaaaaactagacccagaatggcaaaagaaaagctagaaaacagcagaaataaatccagaatatactgctcattgaagctaagaaaaaggaatattttaagaaggtgtcaaagccaaaatgcaccaacagttaaggagatgattttacttaatctgttgcaagagactccagatctcaagatcatgtcttggcagggtggttttccattagacttttataggaaggagtagacaagttataggtcaggtaattttgtgttgttttgcaatcaggggaagtccagtcaactaaacaggatttgtttctctgtgtgtgtagctcctttcaaaggaaaaaattctaatctcagctaaacatccatgagacaaagaatggaaagttaagagtatctgtatctatttttgtcagcagtttcaggcaaaaggggaaaggtctatatttgcccttgttacaggtaaagaaggggatcatctctgagtcttacgggagtcctgagaaagagttgacgcaagtcatatggagaagagtgttcttcaaggttagccatttcctggagtacaaaaagatgtgggagatttaagaaagcaaaaggctaaggaactttcctaattgttgatgttttctggagtacagtgctcaggtaaaggtcaacagtcaaaataaagagtacttaaggaaagataaagaacaatggtaaatgagaaaaggccttaggattgggaatatgtatatttatgaaatcaaggagaacactgttattaaaaacagtaaagctaaaattcagttcacagagaaataaggaaggtgaggaaaagatggcacaattccagtttattttttagtgaagttttatgattgaagaggaaaataagatgtttgtaactttatgaggaaagaggctatttttgcctttttgaagggctatcatgtgccagagaatatatttgagatatatttgttctgtgttattccagaagacagaactccatagaaacttagagggagtagatttcagctgagtatctggaataatttacagaagagctggaatgcctgttaaagtagaggctgtccctctgcctggggtatcataggggattcctgcattaggtggggaaatgctagaggatctccacagcctctttctactctgaagtttctgtatgtattctgattgctttcaaataaataggattttgaaataaggtagataataaataggaggcagttttagatgtaaagtatgtcttggaaaatggctttattggagagaaaaaaacattgggttcagaaaagtgaggcatgatttttcaaatggctgtattatatgataggcagagcgtacatgactctatagagctatcctctaaaaacacggactctccgtgactctttgttctttaactgtttattgttatagtgttcccaaatagtcaaatctataacattctttgccactaaaaataagtaaacagcttggagatctttgactaaaaaataaaaaatcagtacaaatactaatatcactttttcaatatagttctggttgtgttccagtgagtgctattgattcctaaagtgattttttactcaaaagcagcaccataatttgacaggccccaggaagccaaggcacacaatgactgcaaaatgagttgtcccagtaagagatggagattgcatttatttacacacatgcaagtatataatgcaaggcttttttgttataacaatattttaaaaattaactcccaaactgagttaaatcttcacagttggctttttaacattctgctggcactggaggtgaagggggtgatagatgggaggaattatctacacttttatttcctcttcctcaggatagtgcaacgatctcttaaattcttagatatgatagcatttgtagtaattttagctatctctggattttcattctccagtaactcttatgccattttgcctatgaagcctaccataatcaaatgctaactattcaaccttagttactaattttagaggtctccacttattttctttctgcataaaatatccacttcacctcccgcaatttgaacataacatgttagaatttgataaaacagtaatcctcagccatgattctgcaagcctccagagtatctaaaattacttttggtaggccttaaagcaaaattatattgaattaccttgcatttctcaaacaaaaatagcaatggagggaaggaagaaagaagggagagaggattggagtaatacagtacatttaggactctgggaagagatgcaagttaaaatcaagcagattttactcattccccaaggctatgaaaggcaatatgatctaatggaggatcgctgaattctaattagctgtgtgtctttggacaagtcacaaaaactcttcatctttagcttttctcatagagaataaggaactgaaatcagatcatctctaaggtctccttcagcttctgttactttgtaatttcatgaacaactacaagctgagtctgtgacggtatatacagattttgtatttttgtcctgatttatgtggcttagccatttgctttgataaaattaacaagacaactgccaagtctctagtttactttgtgctgtgtagatacagccataagggaaaattaaacaacaaagataaataattgtctggctaatctcaagtactacccaaacacatcatgccgaaccacggcaaggcatgagctgaatgaatatgactcataaatgcagtgcttttatttaaaaatttaaatgttacccaagcaatagatataaataggaaatatttttaggcagctgtagtcactattggtgtcattcttacagagctaaaattatgtctggctttagtttctttattttaaccctggtgtcagataattaaatcatttaatcaaatatcagatcatgggatttggcaaacctagatctgcttttgcttttaaaggtaaatattggaaataccaactttataataaggaatattaactcatcatatattaaaacatttaaaatcatttattgaatttttaaatggaaatcagtataactgaaagatagttggttaactttctcaaagtctggcaggcaggaattactacagtaacacttttatgattgatctcattagatgagatctagggtgacattgttgaaaataatgggtataatagaaataccaaaacataaaaaacccaaacttttgaaaaggccggtacaatgcctaagcaatcattcaatgaatatgaaaaactgagaaggaaaagctaagaaagtagattcaataaaaaattaccaacaaacatgattagcctgtttaatttttcctcacctcttaagtatggacctaaataattaacatcaaatacacgaggtataattttttgaaaattattaacttcctccaaaatgcagcaggaggaattgtagaaaatccttcgtggagggtggaggtcggtgctaacttcaatcatgtttgaacaagattccaaaagaagtatgacgtctctttgcctagaaaactttcaagagaacagccacttcctaccccattctgattccttattcttcaaagtctgctgggattccctatttgagaacgcccagaaacgagagtgttttgcataagtagaaagaagaaccccatcagcgcagtcttctcaaaggatttttccttcatcgtatgcctgtccccaaataacttcagtacttcctggaaatgagaactttctcacaaaaaagctgaaaaatctcattgcatcttaccgttttcctgaaacttaaggaatcaattattaaaaagaagtcttagggtccttttcaagtataggattccagcattatgattaaacaagggaatttttcttgaagttggatggagtgtcttaagcctgcagaattgccatcctctctgtaacttgcctattggatgcaagatttactacccagctggggggtaggctgtgacttggccttttactcattcagtatggtaaacatagtttttctacaaatgaagctagctcaaagataaggtttttgtttgtttaatcaactggctgctattctttagatgtgaaatagagaaggctgttctgctttgaaataccatcgatatcagaaaggtctttgcccttgaaggcattactgcttagtagccttgattcttgtattactgaatcatgacttctcttctttgctgcccttcaagtttggccgatggtcacctttgcctttgtgatcatttttggactttggtctctgacttcaaagccgttttcaaaaaactattctttttttcactccacaagcagaaactttacaagtcagagactcttctctttctttgtcaggatatttgaagacagtttctctttggctgtgagttatgattggataagcataagttagaagagaaaaggttgaagataactcatttattaggcattcatgtgagcaaagaagtggcattttaaaatgtttattgtcatttaatgttcatcacaaatttatgaggtagatattattattcctattttacttatgaagaaatggaaaagcagcaaagatacattttgattacctatatgtgaaacctcttggcacaatgcttggcacatagtaaacattaatcaatgttaggtcccttctagtcatattataatggccaacacttataagcgcttacttaaatatgtcatttattgatatggactttaaatgaacacatttaattgtcataacaaccccatgaggtgggtaccaatattatgaaaaattaggcagtgagaggttaagtaatttactcaaggtcatagtgtcagaagtagaatttatttatttgtttgtttgttatttatttgtttctatttgaggcaggctcttgctctgtcaccaaggctggagtgcagtggctcactgcagccttgacctcccaggctcaagtgatcctctcacctcagcctcccaagtagctgggacgacaggtacatgccaccatgcccagctaatttttttaattatttgtagaggctgagtctccctatgttgcctaggttggtcttgaactcctgggctcaagtgatcctcctacctcagcctcccaaagtgctgagattacaggcatcagccactgcactcagcctgagagacagaatttaaatgtaaacactctggctctagaatcaactctcttaactactactttgcgcatctaaaaatagttatgcttatagtagatatctatttcttactttttctttatatatgaagacttggttataaaattagaagataggtataaaattaaagttagcaaaaaaatggagaatgatgggataatgattttcatggctatgaaacagaatagcattggggttcctttttataatccaatatttttaaatttacaaacttttgctatttcctttgatcatggtaacattataggaccacaggttttcttcccgaggtaattgaggtgactttaattactttggtgacatctacatgtcacaaagcattcaagatatatatatcgggatacacacacacacacacacacacatatatatatacacacacacacatatataccaagtatctagaaacatactttccaggcatgtttctaggtacttggtattcactggtgaacaaaataaaagaaatctctgcttttgtggagttaaaacaccaacaaatgtatacttttcttttgagaagttagtccacagtcaactgaagaagactaaaaagataccacaaactatgatataatgcaaggcatataacttccatatgagaatgaagtgatgaattctgtttagtgtaagtttggaggttgaaaatgtagttgagctgggtcataggaattataagcagtaaatccaaatgagtcaaacttgaagatttactacatccttcactgatatcattggctggtctgcctcccaactccagtttttaatttttggttaaagagctatctttggtccagatctccataatcaaagtccaagaagggaattcttgtgcatataatttattggtgcaaacttataagagagtgagagaaaagaggatagagcagaggaagataccaggcaaagacgagagttcaggggaaatgtctcagcctgatccaacagagagctctgaagcacaaactgcaccatagaggttgttttgtccaaaagcaagggtactggagtggagtcatggtaggcagaggggcatgacccctcaggaaccaggttgaggtggctcctattttctataccttacccaagtggcaggtggggctgttagcagccaacacctctggcagctgggggatgggagcatggacctggtaaagaagatctgagaggggcaccaacagcatctactacaaggaatgtaggacatctgaaaggcacgtggagagatgtagagttgtagaatatttgagtggcaagtgagggaacagatgatattgacaactggctgggttttttttttttttttttttgctatctctttttgctttggtgggacatttataaaatctgaaataggtattatttatttttacttcactgaaaaatcttaaatgctagtagtttaaatttagtaaaatagaaaaagcagcactgtcattcagaaccccagatttaaagttagttcttgtaggcaagtatgagactgccttttattttgattagttttgattaatgggaacctctttcattttaagtcagagtccacaaatttacatgtcttactccagacgccctgcctcctcttgcttttgcagcgagagttctttagcattttttaatgcctttaggcaaaacctgcactctccagttccccacagaccccactgccaattttacccttggccagattttcacattaatgttgtttgcctggcctcttaggcaattgagtttgcgaaggctggaggctgaaatcccagctcagattttcacctagctgggattcttctcaactgggatcctgtggagtgaaacggggagatgtagaattgaaattactgatgtgtttcttgtaaacttcttttcagagtgttaaacacatacaattaacattgacttcctagaattaaaggttagtaaattgatcgtgttctaaaacaataacataaatttgcttatttcactctaaggcctatgtcaaagaatatatgctaatgaaccaaatcataaagcactttttcattttcaaggtgatgtacaaacattgactaagtagctttttaaaatgctaatatgaaaaaaggttattactggataatcagtcatattgtaactgtcctttatagcactttaaagtctcaaatggcattcttaatttttactgcattttgcaagtatacatgaacatacatatatatatatatatatatacacacacatgagcaattgattttaatgttaattttaaacatatgttttcaagcttttccagtttatggctcgataactttttcacggcacccctaaacctctgcttattagacagttaggttcaaggagcttaataatagtatattgcacagtatccaacagatagtttctctcaaatttcaaaatatatattggcactcctgtgagttcactgtagcacccacggattcatgtgtatggtttgagaactacaatttaaagtgctgattcactataatgtgccaagcagtgtagataacttatggttaccatagaaattgaaagtttcccaaaagtttgctttctgggaaatcacattctaagtcaacctagaaaaattattcacctactctttttttttttgtctgtagatatcataggctataccttgacctagtttttactgtgaaaattgagaagtttgaactgagtgaaataagtgttaaaatcaaattttgtttggagataatttagatattttaactcaaatatttaaaacacgtttattttaaacctgattaaaactgatttatggagtttttaaagagggagaataacaaaatctttttctgattcattgatcagtataaaaaagcactgctatagttgaatatcagtgacatggttctgcttattccagtttttgttttataatttggtttagttcaaatctctgagaaatccactaaaaattgttttgaaccaaattttcaggatgtataaattgtttttattgagaccaattagctcttcaatctcttgcttgtgtccatggttagagttcatagcaaaaaattttcattatttaatgtcccttcacagtgaaaactgggtaaaaaaaatagttaataataaaattctgttaaaaatgaagcctcccaaagtgaaacttaggttttatgatttttgtccactcaaattatttaagaacatagcctattttttttccttcttttccgtttttatgtttggtaagataatgaaaccaaactatcagcttcaatgtctcagtgaatccagcctgccaaggcataaagataaagcatgtttttgggttttgaatgtcatctgccccagtctcctagaaaaatatcataccataaaggaaagattactgggctgtgagtcaggagtcctggatttcagtgctgcctttttcaattttatgaccatagtagagaaattacctaatttcttacagcttcaattttcttatcaaaaaattgggtgttaaagtatctcttacgttcctccaagctttagatttctgtggttataccatatatcaaagttcttaaataaagctataaattcttcacggtcatatgtgtgtgtgtgtgcacgtgcacgcatgtatttggaattcccctgggagaataaaatagtccttatttcaaaaagaattcaggaaattatttgacggcaaagtgctatgagccaacactgcaactgtgataatgaccacttgcaatcaatttatggcaagctcacaagaatttgaaaatgctgagagaaaagagctcctgaaactcaggtctttagaagtccatgataaagtttgggcacacgtgggatttttaagttctaaatacacacacacacacacccccccctacagaaaggaggaaaacaaaaattcctaggttgaaatgtctctaatcatcactattagttaacaacactcactatcgcattatttttctattcttgtcatggcatttctcataatttctcagtgccattggaaccatcagtgtttatctttaggctgactctgcattctacctcttccctccaacccccaaacaaactgaagcaatgcctcaatagacccacagattccactgccagctcagcatgtaatttagctgggagcagggatgagggagtgattttatttgactgtttgttatactaaagtgagaatacccttaatttcttgttttaatttttaacctttagaagttgacttattcattgtaataatggtaagaaataaagttaacatcatttaacttaatatatttacttcatcttattccaaaaattattgagggcaagtaggcaagccatgtaaattataattattgatgtttctgcatatttctagttggggaagaagagagaacactaatttttgatgatttgatagacattttttataaataatgttttaagaagttttcaaggctagtcaacttgtaccttctttggctttagttttaattttttaaaaaaatatctctgggttttttctccattcagaaaaaaacactgtcttttgttctatagactagaaatattatattctgtcctagttttataagagtagctgtctttaattaatagtcactcatatctttattttctgagtagtgctctctaattaattagtcattcatatctttgtttcctcatcagagtcagactttacagaaacattctaggggagaagatctcttaatcatctgtctgggaaagaagttttttggtgggtagtggaagaattgctttttttcctcttgagactattaaacttggcagctagaattaggttgagtgaatttctcaaatccttcatttcctgaaggttggattaaaattcagcaaatctcaaaccccataaattggattaaaatctcgacaaactacattctgcactttagattttataaagcactttcaaatacctcccttcaaactccaaacaacccacgataaggtagggcaggcattattattcatattatgtgtatattaggaaactgagacaaagaaaggaaaagcatcttctctgaagtcgtatgattagttagtggcaaagtctaggctagaataggaatcagcctggtcttaggcctaaacttgagggaaaaagtagacatgtagatggcatattgcagatatcactgagaccccatcatgctgcctctgatttttcttcttggttactctttgaaatcctttagtgtatagtgttattagcaaaaaggttattctctcttttaagtgcttggaaagtaaggaagaaatgggggcagagatgttacttgcataattctcctcacatcaaaatgaaatatactggctcagtgttttgaaaggaacttaaaatgtgaaacatggtaatgaaacaagcaaaatgtggatcacagtgaccactgaaagccatgatccaggctccagatggacatctggtatatagctaaagaaaaagactgtgtgagcaacaaaagggccatatgtgagttagctgccaaagatttttattattattattattactttcctttgagcttttgaggtgatgatgcttaatattcaagaaagatgaaaataaaaagagaggaagcaaacacccagctcattggtgattggtagagtaattgtgggcatggccccaggatgatagcagcttctatttaatcaatgttgacaaggctggggagagctgggcaggtcccaagaggtaatgttttactcggaaatccactcaacctaatttcagtaatgtagggctgtggaagggcctggactggagccagaaaacagggccattagagctcagtgtaggcaatggcagctgggaacatcgccatccctccagcagcattgcaaccaggctgcctggctgagcgcacaagcagccgctgctgcatatgctcctggtatttgctcaccaacagaatgcatcgacatgctattctcatcctttcaaggaaatgaatggaatgcataaaggcaagaactgcttccaaactctattttagcaagaatcagagagcaagtttggcatacatctttcaaggaccactgtgaaattgtccacttaatcccctgaatcctttaaggctaccattacattgttgtaaatacatgcagagataacttagatctttattgctgtcttagtgtggttttgatctttcttaggaattgtggttgtggatcaagaatatggaaactactatggtttttcctttttcaaaacttctgagattcattcaaattagtcagctttgcaaatccaagagaagtgacccaggacgaattacgctccttagggctgagtgcttcttatctagctgttctttcctttaccattctttctccaataaacaacacattattacagtaatttgctagcatataaattccaataacttagaggtttttgctttgtgttttcatggctgtgtcaccactgctatacttgcagttcgtggaacagtgtatggacatagtaagacataatttctttcactggatgaataaatgaatgaatgaaaacattttctttcttcccttttgaaggatccttgagctatcatgcatcaagaatatatgaatttactttctatgatgttaactttctctttttaagttaacacagaaatgacaaaattcatggaggctgccagtgaacgtggtggtaatctctaagctgtctttgggcttggaagagcaatgtttttgtcaaggctaaaatgccatggcatgggcaggttacagctttctatcagattctaacattatctgtccaaatgactgaatataatttttgagactaaatcgtggcacagcaagagtatttaatcaacttcattaaataatttaatcaagtttttgagcctctagcttaagcctctcatataaataaggttatttactcctgaaaatatgactatgttccatttgaaaaatttgtgtcttgaaaaaacttttttcccctaaaaggaaaaaaagcctaaactactaaaactaaatttaaaactaaaacacatcatcgatttttgtttattgtttttttttttagacacattcggttttataatagaactggatttgggggattgattttgccctggtaaagatggatttggggagaagccatcactaggtagataatagtaatagtcttaggaaattcattcaatggtcactacatagatacacgtgtgcgcgtgcacacacacacacacacacacacacatacagcccgagtgtctttggctgctataataaaataccataaactaggtggcttataaacaacagacaaatcctggtaagggccagctttctctgtaccttgctgtgtcctcacatggtagaagagactagctagttctctgttgtgtctttcataaagacactaatcccagtcatgagtccgctaccctcatgatttaaccacctcccaaagattcctactcctaatgccgtcaccttagggggttagaatttcaacatatgaattttgaaggaacacagacatttaatgcataatactgtgactcatttttgtttttcctgtaatgtcttaaacaaaataacagtactaatattaagttttaatgtttaatacaagtaaaagtactattcagaggcaaactgaaaaagaacaagcatattctacgcttcgccttgctggatttcagccgtcacactagcacttccaggctttcctcatttgccagctccaggtcattgcttctactcacttgttctatgtcacctggtgttgaaaatcacacttcaatcttctagactctatagcctcttcctaagtaataactgtctcagagggaggttgatccgctagatgaggaatgtgactatttactctaaatggaacatggtaattggagtgaccagctggccccagccattcatttgtctttgacactcaccatgatgatcaaagattttgcacaaaatactaaagattacatattaactcatctctagcatttacaaatcacataattagtgctggaaagtgccaagaccagattttatactacagaagacttatcaggattcttcccttcatttttagctgcttttaatggtacaatttttaaacgttgtaatcttcagacctacatagctgtggaccggactccctgctttagttatcactctgaacttacccattctttttgggcaaaggtaaaaccagggaaagcaactaaagtaaaatctgctgagataactctgtcctacgttggaatttacagtgtggccttacgtaaaccattcagtctccctgtgtttcagtttccccagctgtgaaatggggtgattaaggtagatgtgagaattaaatgcaatgatacaggtacacttcgcactgttctgagcacatagtaagagctcgaaaatgttaactatagctaaatactttatacaaaggaccagggaagtcacaatccataattctttccaggcagttgttttaagctgctgaatagaacaggtaagaaaatgtagatataaactaaacagtcgacattatttatcactgcaatgatttatctagggttgacatcagtgggagaataagctagcaatatcaaaatgttccctctgatattcaggcttaaatggaactatttatacaaaacttggattctgtttataataagttctgctttgtcagaggttaaaacctttcccaaactcacatgcagtctcctaccaaaagtagggctagctagagcaggtgtattgtccacatctggctattgttcccttatttggatgtagaatttttaaaaaatgttatcatgagttcttagtttatctcactttggaagctgtaatagattgtttctttacattgtttcctccatccatattttattttcctctccataatttcttggtggcctataaaactttcactgcatccattgacttgacccacttttttttctgccaactagtcatcccttcgcttaaaacaaagcaaatattttgcttaatattcaataatatcaagtaaaaaattactttaatctcagacaaatatatatatatatatatatatatatatatatatatatatatatacagagagagagagagagagagagttttatatgttccagctaactgactaacatttccttttgtagccatctaatcgagcttcatcaattttaattttacgggttttattttataatttggagccaacaattttttaatctccaaagttgtatgggtcactaaaaccctatggactctagctacttagtttcagtgccgaattgctaaaatgagtttggccacctgatataatcggaaaaactgaacaaatagacctgagttttagctctggcttggtcataagcaagtcatatgatttagggaaagttcctttatgcacctagacttcagtgtcatcacctgtaaaatgaggctgtccagtcattccttcactcaagaaatatttactgaggttctttcctgaatgaggttatgtgctggacatgggattcaaggttgagctgaagtaggtactgctgttacccttgaagagtttatggtttagtgactggatgatcttaaagggtccactcatttctaacattctatatttataaattttattgtctttttttttttttttgacagagtttcacttttgtcccccaggccggagtgcaatggcaggatctctgctcactgtaacctccgcctcccaggttcaagtgattttcctgcttcagcctccctagtagctgggattataggcacatgccactatgcccagctacttttatatttttagtagcgacggggtttcaccattttggccaagctggtcccgaactcctgacctcaggtgatccacccatctcagcctcccaaagtgctgggattacaggtgtgagccaccgcacccagcctgaattttattgtcttttaaaggtatattatgaaaggctttaaggagagcaaggattttgcttttttttttttttttctcagtacctagaagaatgcctggcacagtgcaggtgtccagtaacaacttattgaacaaataaattaataaatatttacatttaaaatactttgaagcatttgagaaaatgaatatatattgaggctctctcaatagagcttcataatttcctgtcataataaacagatttgtgccaaatttcgtcttttgtcctaggaccaggcaatggatgacaagagaaagtgggagaatttgggaggatttagcttgattgtattccaacaagggaacagaaagtgtagctgcatctcagaaccatctgaatgttcaagtttctgtttctgcatttttgagttttattccctttattcaacaaacatgcaattctcacctttcccagtctacttccctttttctctcatttcctaatctccctctaagcatacataatagctcccatgtctttattttggaaggagagatttgaagtcttctcttgttcctataactactatctttctatatgtttctgggttgtgtaaatcaatattatgtttattttgcagtttgaaaagggcactaaaaacattgcttcttggaactgataaggatggtaaactaccttgggcatacttgtaatatccaaaggtttgagcagggttagggaaccaagcaaactctccaaaagaattcctaattgttttagaaggacttcactgaaataaatctggaatctttcttctggtagaaaattaaatacctcattagcacaccaaaatttttgtaattcctgaggaatactgctgatgcatagtgtattataatgatcagaattgagttagtttcatgcaaaacttggataggtgcactgtgttcaacaggtaattacagtcactttggaaagctatagccttaaaaaaatcttataagtagtagtaggtagcatcactagaatagctatattttatgaatagcttatagtgagttatgaaccctataaaataagtcagactttaaaaccctggtcaaaagtgagtattataaggtaaaattacccatcgtagctgcttactttatttaccagactagtctagttagattctaaaaacctaacctattttcaaaaaataagcatttctgctactgaagagctctaaaagaatgttttttgataggtatttcagagaagaaattccataaatttgtttaataatggtgggtataaatgttcagcttcatctgaatgtaaatatgtagctggctgatttaaaagagacatacattttgatgagctcttttaatggtctccttaatgaccccatttctctaatctcaacatctatgtacagtaaaactattttatttagtattcctagtttaatctcctcaaagcatagctgtattatgttccttgctcaagtgctttcaagctatgtctgttatcttctaattaaacacaaatttgttagcctaacaaaattacatggactccagtttacctttccaagaataatcagcacctagtagttgttaagaggaggacaagcaataacaatagctccattttaagacagaggcatcgtcaatatcagggattgaggaaaaaaaaaaacagttaatacagtaggcctgggactgctatccttagaaaggcttgtttgtaaagttgaccattggctggcatctgggatcttggattttgagaagattctcatcattccttaactgataagagtggttccaggtgcctaaaatcatagtacaaacaatgtggtttatgctgaacatctatttttcttctgggagtctgaattttgtacctgcttgctggagggtgcctacatgacctattaccagtgcaaactcactcagttaaacttccctaatagatgacatcttccatgtgttatggtaatttattgctgaaagaattaagcacatcctgggtgactccatggggagaagactcttagaaatttgtttggtttcctccaaactttgcccatgcgcaactttcagctttgcttattttgctttgtgttttttcgctgcaataaattttagttatgaagcagactgcatgctgagtcccatgagtcctcctagcaaatcactgaacctaggggtggtcttgggggacactgacacagggagttgattgtttggcaacacaagttgtttcagagcaaatgaattctttttccacaagctagcatattagtaaactatcagggagcataaaatcagttgactgagttctgtcgggaaacaaagggaaaatttttcttcaaaaagacatgatatcctccctgttaagcaaagcagtactttccctatggataagtgtattcagttggaatgtgcttggctgcaagaaactgaaaactattatattacaatgctttaaagaggctagtgacttgtttctgagggaaagatatctaggagtggtacagtcactcagtgatgattttttctttttgctccaccatccttagtgtatagtttttgtcttcatggtcacaaggcagctgctacagtgccatgtattgtttgatgtccaagtgatcaggaataggagaatgtgaagggcaaaacccaactctgccctctctagggacttcaatttctatataattgactagcactgtcccacaggagctgaaaattcaactacttcacttttcaatactggaaatgagtggtaagaaacttggactagatgatcgatggtccacataaattatctgtcacaattcttctgacactaatagaacagcaatacaagattgtcgttgattccctatgtgaagatcctgtatgtggataccttgattgtaaggctgagagattaaagaccatagtaacttttgttaagtggtctccttgtcactcacatacctttgctcctgagttcttccataggtgccactgaacagcttccttgaggtaaactcttctgaacttgtaacctacattaactgggatattaataatctcttttaatcttaatgctcttatgaaatgacataaaaagaagaaatgcattgcactgttgtatgagcagataagacaaaatactaattctctccttttccccccatcctatcttgttttctttctcagaagctgtagatgaaaccaaacctaaggaaagtgcccggcaggacgagggtaaagaagaggaacctgaggctgaccaagaacatgcctgaactctaagaaatggctttccacatccccaccctcccctctcctgagcctgtctctccctaccctcttctcagctccactctgaagtcccttcctgtcctgctcacgtctgtgagtctgtcctttcccacccactagccctctttctctctgtgtggcaaacatttaaaaaaaaaaaaaaaaagcaggaaagatcccaagtcaaacagtgtggcttaaacattttttgtttcttggtgttgttatggcaagtttttggtaatgatgattcaatcattttgggaaattcttgcactgtatccaagttatttgatctggtgcgtgtggccctgtgggagtccactttcctctctctctctctctctgttccaagtgtgtgtgcaatgttccgttcatctgaggagtccaaaatatcgagtgaattcaaaatcatttttgttttcctccttttcaatgtgatggaatgaacaaaaaggaaaaaattcaaaaaacccagtttgttttaaaaataaataaataaagcaaatgtgccaattagcgtaaacttgcggctctaaggctcctttttcaacccgaatattaataaatcatgagagtaatcaag

SEQ ID NO: 315 - DNA, 1673 bp, Homo sapiens
acggagagagagggaagaaaaagacagatagatagatattggggggaaggagaaaaaaggagaagagagggaagagaggacagcggagagagagcaccagagagagagggagagagagagagagcgctagagagagggagcgagcatgtgcgatgagcaatagctgtggaccttacagttgctgctaactgccctggtgtgtgtgagggagagagagggagggagggagagagagcgcgctagcgcgagagagcgagtgagcaagcgagcagaaaagaggtggagagggggggaataagaaagagagagaaggaaaggagagaaggcaggaagaaggcaagggacgagacaaccatgctgtgctgtatgagaagaaccaaacaggttgaaaaaaatgatgacgaccaaaagattgaacaagatggtatcaaaccagaagataaagctcataaggccgcaaccaaaattcaggctagcttccgtggacacataacaaggaaaaagctcaaaggagagaagaaggatgatgtccaagctgctgaggctgaagctaataagaaggatgaagcccctgttgccgatggggtggagaagaagggagaaggcaccactactgccgaagcagccccagccactggctccaagcctgatgagcccggcaaagcaggagaaactccttccgaggagaagaagggggagggtgatgctgccacagagcaggcagccccccaggctcctgcatcctcagaggagaaggccggctcagctgagacagaaagtgccactaaagcttccactgataactcgccgtcctccaaggctgaagatgccccagccaaggaggagcctaaacaagccgatgtgcctgctgctgtcactgctgctgctgccaccacccctgccgcagaggatgctgctgccaaggcaacagcccagcctccaacggagactggggagagcagccaagctgaagagaacatagaagctgtagatgaaaccaaacctaaggaaagtgcccggcaggacgagggtaaagaagaggaacctgaggctgaccaagaacatgcctgaactctaagaaatggctttccacatccccaccctcccctctcctgagcctgtctctccctaccctcttctcagctccactctgaagtcccttcctgtcctgctcacgtctgtgagtctgtcctttcccacccactagccctctttctctctgtgtggcaaacatttaaaaaaaaaaaaaaaaagcaggaaagatcccaagtcaaacagtgtggcttaaacattttttgtttcttggtgttgttatggcaagtttttggtaatgatgattcaatcattttgggaaattcttgcactgtatccaagttatttgatctggtgcgtgtggccctgtgggagtccactttcctctctctctctctctctgttccaagtgtgtgtgcaatgttccgttcatctgaggagtccaaaatatcgagtgaattcaaaatcatttttgttttcctccttttcaatgtgatggaatgaacaaaaaggaaaaaattcaaaaaacccagtttgttttaaaaataaataaataaagcaaatgtgccaattagcgtaaacttgcggctctaaggctcctttttcaacccgaatattaataaatcatgagagtaatcaag

SEQ ID NO: 316 - protein, 238 aa, Homo sapiens
MLCCMRRTKQVEKNDDDQKIEQDGIKPEDKAHKAATKIQASFRGHITRKKLKGEKKDDVQAAEAEANKKDEAPVADGVEKKGEGTTTAEAAPATGSKPDEPGKAGETPSEEKKGEGDAATEQAAPQAPASSEEKAGSAETESATKASTDNSPSSKAEDAPAKEEPKQADVPAAVTAAAATTPAAEDAAAKATAQPPTETGESSQAEENIEAVDETKPKESARQDEGKEEEPEADQEHA

SEQ ID NO: 317 - DNA, 1688 bp, Homo sapiens
cagaattaaaagggaacctggtctctgggttgttttcaacatctcaagtgtgaattttccctgtcaaaatcttcacaaggaaaatgagtcacagcatcacctgggtgacgaggtcataacacctcagcccttgcttaaaaaattttatttctacttttctattgtaaagagatctcaaaacaggaagataaaattggactgacagctctacagcctagtcttttagacagtgaactaggccagcattggcagacactggcgatgacaaagtcctgctctgaattatgccaccccgcactccactttttaccttgcctgggaggcttgaggaaaaatcttcagagagcagttcgacctagtccttattcacttggcttcttgactttctggatttcaagggttgaaaaaaatgatgacgaccaaaagattgaacaagatggtatcaaaccagaagataaagctcataaggccgcaaccaaaattcaggctagcttccgtggacacataacaaggaaaaagctcaaaggagagaagaaggatgatgtccaagctgctgaggctgaagctaataagaaggatgaagcccctgttgccgatggggtggagaagaagggagaaggcaccactactgccgaagcagccccagccactggctccaagcctgatgagcccggcaaagcaggagaaactccttccgaggagaagaagggggagggtgatgctgccacagagcaggcagccccccaggctcctgcatcctcagaggagaaggccggctcagctgagacagaaagtgccactaaagcttccactgataactcgccgtcctccaaggctgaagatgccccagccaaggaggagcctaaacaagccgatgtgcctgctgctgtcactgctgctgctgccaccacccctgccgcagaggatgctgctgccaaggcaacagcccagcctccaacggagactggggagagcagccaagctgaagagaacatagaagctgtagatgaaaccaaacctaaggaaagtgcccggcaggacgagggtaaagaagaggaacctgaggctgaccaagaacatgcctgaactctaagaaatggctttccacatccccaccctcccctctcctgagcctgtctctccctaccctcttctcagctccactctgaagtcccttcctgtcctgctcacgtctgtgagtctgtcctttcccacccactagccctctttctctctgtgtggcaaacatttaaaaaaaaaaaaaaaaagcaggaaagatcccaagtcaaacagtgtggcttaaacattttttgtttcttggtgttgttatggcaagtttttggtaatgatgattcaatcattttgggaaattcttgcactgtatccaagttatttgatctggtgcgtgtggccctgtgggagtccactttcctctctctctctctctctgttccaagtgtgtgtgcaatgttccgttcatctgaggagtccaaaatatcgagtgaattcaaaatcatttttgttttcctccttttcaatgtgatggaatgaacaaaaaggaaaaaattcaaaaaacccagtttgttttaaaaataaataaataaagcaaatgtgccaattagcgtaaacttgcggctctaaggctcctttttcaacccgaatattaataaatcatgagagtaatcaag

SEQ ID NO: 318 - protein, 274 aa, Homo sapiens
MTKSCSELCHPALHFLPCLGGLRKNLQRAVRPSPYSLGFLTFWISRVEKNDDDQKIEQDGIKPEDKAHKAATKIQASFRGHITRKKLKGEKKDDVQAAEAEANKKDEAPVADGVEKKGEGTTTAEAAPATGSKPDEPGKAGETPSEEKKGEGDAATEQAAPQAPASSEEKAGSAETESATKASTDNSPSSKAEDAPAKEEPKQADVPAAVTAAAATTPAAEDAAAKATAQPPTETGESSQAEENIEAVDETKPKESARQDEGKEEEPEADQEHA

SEQ ID NO: 319 - DNA, 982 bp, Homo sapiens
acggagagagagggaagaaaaagacagatagatagatattggggggaaggagaaaaaaggagaagagagggaagagaggacagcggagagagagcaccagagagagagggagagagagagagagcgctagagagagggagcgagcatgtgcgatgagcaatagctgtggaccttacagttgctgctaactgccctggtgtgtgtgagggagagagagggagggagggagagagagcgcgctagcgcgagagagcgagtgagcaagcgagcagaaaagaggtggagagggggggaataagaaagagagagaaggaaaggagagaaggcaggaagaaggcaagggacgagacaaccatgctgtgctgtatgagaagaaccaaacaggttgaaaaaaatgatgacgaccaaaagattgaacaagatggtatcaaaccagaagataaagctcataaggccgcaaccaaaattcaggctagcttccgtggacacataacaaggaaaaagctcaaaggagagaagaaggatgatgtccaagctgctgaggctgaagctaataagaaggatgaagcccctgttgccgatggggtggagaagaagggagaaggcaccactactgccgaagcagccccagccactggctccaagcctgatgagcccggcaaagcaggagaaactccttccgaggagaagaagggggagggtgatgctgccacagagcaggcagccccccaggctcctgcatcctcagaggagaaggccggctcagctgagacagaaagtgccactaaagcttccactgataactcgccgtcctccaaggctgaagatgccccagccaaggaggagcctaaacaagccgatgtgcctgctgctgtcactgctgctgctgccaccacccctgccgcagaggatgctgctgccaaggcaacagcccagcctccaacggagactggggagagcagccaagctgaagagaacatag

SEQ ID NO: 320 - protein, 210 aa, Homo sapiens
  VARIANT (1)...(210): Xaa = Any Amino Acid
MLCCMRRTKQVEKNDDDQKIEQDGIKPEDKAHKAATKIQASFRGHITRKKLKGEKKDDVQAAEAEANKKDEAPVADGVEKKGEGTTTAEAAPATGSKPDEPGKAGETPSEEKKGEGDAATEQAAPQAPASSEEKAGSAETESATKASTDNSPSSKAEDAPAKEEPKQADVPAAVTAAAATTPAAEDAAAKATAQPPTETGESSQAEENIX

SEQ ID NO: 321 - DNA, 1289 bp, Homo sapiens
gttgaaaaaaatgatgacgaccaaaagattgaacaagatggtatcaaaccagaagataaagctcataaggccgcaaccaaaattcaggctagcttccgtggacacataacaaggaaaaagctcaaaggagagaagaaggatgatgtccaagctgctgaggctgaagctaataagaaggatgaagcccctgttgccgatggggtggagaagaagggagaaggcaccactactgccgaagcagccccagccactggctccaagcctgatgagcccggcaaagcaggagaaactccttccgaggagaagaagggggagggtgatgctgccacagagcaggcagccccccaggctcctgcatcctcagaggagaaggccggctcagctgagacagaaagtgccactaaagcttccactgataactcgccgtcctccaaggctgaagatgccccagccaaggaggagcctaaacaagccgatgtgcctgctgctgtcactgctgctgctgccaccacccctgccgcagaggatgctgctgccaaggcaacagcccagcctccaacggagactggggagagcagccaagctgaagagaacatagaagctgtagatgaaaccaaacctaaggaaagtgcccggcaggacgagggtaaagaagaggaacctgaggctgaccaagaacatgcctgaactctaagaaatggctttccacatccccaccctcccctctcctgagcctgtctctccctaccctcttctcagctccactctgaagtcccttcctgtcctgctcacgtctgtgagtctgtcctttcccacccactagccctctttctctctgtgtggcaaacatttaaaaaaaaaaaaaaaaagcaggaaagatcccaagtcaaacagtgtggcttaaacattttttgtttcttggtgttgttatggcaagtttttggtaatgatgattcaatcattttgggaaattcttgcactgtatccaagttatttgatctggtgcgtgtggccctgtgggagtccactttcctctctctctctctctctgttccaagtgtgtgtgcaatgttccgttcatctgaggagtccaaaatatcgagtgaattcaaaatcatttttgttttcctccttttcaatgtgatggaatgaacaaaaaggaaaaaattcaaaaaacccagtttgttttaaaaataaataaataaagcaaatgtgccaattagcgtaaacttgcggctctaaggctcctttttcaacccgaatattaataaatcatgagagtaatcaag

SEQ ID NO: 322 - protein, 228 aa, Homo sapiens
VEKNDDDQKIEQDGIKPEDKAHKAATKIQASFRGHITRKKLKGEKKDDVQAAEAEANKKDEAPVADGVEKKGEGTTTAEAAPATGSKPDEPGKAGETPSEEKKGEGDAATEQAAPQAPASSEEKAGSAETESATKASTDNSPSSKAEDAPAKEEPKQADVPAAVTAAAATTPAAEDAAAKATAQPPTETGESSQAEENIEAVDETKPKESARQDEGKEEEPEADQEHA

SEQ ID NO: 323 - DNA, 709810 bp, Mus musculus
  misc_feature (1)...(709810): n = A,T,C or G
attaccactcacactgtacttccagggagacaccgattatgagaagagaaactcagcgctggggaagaaggtaggggcagacaactttcataaaaacaaccctgcctcctcagtccccttgcatttatcatcttatttactccacagtgcttttaggctttctttcctgaattttaatttctgtatctaaatttgacagagctaatgctagtttgaattttggaacatctataggaggcctaccctgtactaattttcttaattatttaagggtgtgaccttgtgattcagttttattagtttaaaaataattacaaacaaacctatttttcttactaaagtaatgagtaaatcagaatcgttcactcttttaaaacaaactcctccgtatgtttgtctctttgcttttctcgtctgtttatgcaattccatctgtctgtctatatatcatgttgtccttatttattgctaactggattttgttagttatttgccagtgagttttagctgcagtgccagtgtgggtactaccaaaatgagactcttgttctttgttttacattgaagtttaaagtccatatttacagtatagatcctttaagcaggttgcatactttatgctagcatgtttatttgatgacattggacataaggtgaagggtagcccctcagggtgggcaagaatcaaggaactatttttttttgctactacacatgtagaaatagtgcatcagggggttatagtttcaaagaaattgtggctattttctaactttttattttatagatagattgttgcatttatatgggtattactgtggttagtaagagtataaactttcttaacaagaagtttttatcctgggatagtttccttttagtatgttagtgcttgtttatgcttagggagggaggagtggaggctggcctttttacattttttttttttttaacaaagtggaagctatggagtgtatcaggccattttgtgcaacaactgtaagtattcccttaacatatttgagtccataaataatgtatttgttattgcaaatatgtatttgaggtttttttttatttcttttttcttttcatggtgggaaaaaagctatgcttgaaaccagcttgcattgttgaggaattttctagaatagtgctttttcaaaatttcaaggagtagttaaataaggtggatgtgaagtatacttttagatggacttctatttaggtttgtgcaaaagcagaacttttattcatctgataaaaattaagtcagacagagaggaacataaatgttttcagaatatacacgagcagtgataggaaatgaatgcagatctgaggagatgtttgataataacaatcacctttttgtaatacattatttatttactataagtagcagactttcccctgttaattccattaggcctctctgacaacacaaagaagtccagaaagcaatattcttaacccacctgggactcgagagcagactccacaacacactctcaaggttcaagcctagtaaagcgtttattcaaatccattattaggggagggcggtgaacttttgctactaaaagtcttctttaccgcttctttaaaaaaaaaatatacttagacttttaatttagtttttttttttttctccactgtcttttcagctggaaaggccagccctgaccaagagcatacagacctgaagtacattcagtcaggccctttcagagattgtttttttttttttttttttttaatcaaaggtccatggaaagtttgaaggaggctttaggaaacgtgtattaacactgtgcatagttggtgttgtgaacagaatttttcccatttcagactgtgatccaaaaagttgtttcagaactaataggtcagaagtgtgtctgtgtcgtacacctgttatttttggtattatctcttgaagaattatctaagatgctcttttagataaaagaaatctttcacagactgtttgatcaatcatcttttgtgcatatgtattttgtggaaatagtgtgaatttatgtatataattcatgtttatatggatccaaaaatcatagatgcattgctgatagaattttaaatatttcacattgtgtttttacattaaccataagtaaacaccaaatgcttaactccaaaagagaatggaaatttttttacctcccagaaaggataaaaggaaggaaaattttagtcatttctgtggtggttttaatttttagaatgtgttttcttttgcattataattcttggttggccttcagtaaatcgaaaatatttttaggatgaaaaatactcttgcccttttctgggaggaactgtcacaatctaaatgctgcaggacactgtaaaatgtgcataagtaaacttaaagccagtgccctctgctgcctagggatttggaaggctgaaaggcttgcgtcacaggagggctatagagtgccagaaaaattcattaaccagtcttactggttatggggggctcatcttcctgtttaagtcccgaagccctggtcaggtcatagtgtgtttcattttaatgttagagcagacagttatctaacacacccacatgaggaagtgctctaaagcagttatttcatgctttgccatgccctgtagctaaaacaatttggtattgagtgacgtgtgtgtgctttttaactcctatccgatgaaaatcagctttggctctttgaaaagcacccaaacagtggaatgccaaacagtatgattcaaatgctaagcacatgccagcttaaactttctcaatttttttttaactgaagggcaaatcagtatgattatttttaatagaaagactatgtatgatttcctggatcttactcagtagggtttcaaaaattgcagatccttttccttcatagttttttccctgcagaagcctatattcatcaaaaggaaagcagctgcatactttctccctgaaatgttaacaaataaatggcattcctgtttatttatctatttttgaattttaatgattagtccttgtgctaattaacaaattcctgtattcataaaatctggcactatataaataaccaattgtgtgattatctacacatgttctggctttctataaatatagaaattattggtggatgtgtccacggacttgcccaaccctgaggtgtggctggtcatgctgtcacataggaagccaaatttaggccctgagcaacatgttgctccgaggtctggcaaggtatgtggaagcagcatctggcccctgtgctcactgtgatcttttctggcaaagggaggtctgctgttgacattctttgaatgctgctggttccagccttcttcatttgtaagcatggctcttgagagtagctgttgataatgggcattcgagctgccccaccttgacctacttaaaaatacacaaattatggtttttagtagaaaatgtgctttatttacaactactaaagaagcccatcctaactttcttaactagtaaggacctaagctgtactgaagagacaaatctgactattttcagttatttggctctataaaatacaaattttagaaatttggtatcataaagaaacaggctgtcctactgtagtggacacactgtcaattgtgcaaggtagacttgtaagtgcttttatctctccattaaaaaatcatcttgaagtagcttacaaagtagcaggtttccatatgtctttttgtctatacttagttttggttgacccttgatggcatgcacttccagaggtcctaacctagtccttccgtctgcctgtgttttcatgtgccagcaccacgttttaacgaagcaatctgttctttgcttagaggccaaggtcttttaattatttttctcattatataagacattttggttgctattatgtaatcccttaacttagccaggtacttttcatttgtgacccaaagtctaaaggctacatgcattctacacattctagaacatgtctgacttcttgtcctgttacccaaatgtcctataatcacatgtcagtatcgaaacctattatatttaatgtgccaagaataatttcaagctgtttcagaagcagtagaggcaagtttctgaggctctaagaagaaatagtgccacctacctgtattactgttgagcatgtggtatgtaccacagcagttgttcaaagccgccttcaagggcttagaagtgggactttttctgggactctgtcctcctgtggtaatggacacattgacaaatactctgctggttctgcactcaactcagggaaaactatgcttgattttggctccataacatctcttctactccaggatcaagcttctcggttactgtacagttcacttgagagtcatcagcttgagggcatggaacgtttgcctttctggaatcttttgacactcagctgagactctaggcagtgttttgtagttctgttaagcaatgcagctcttacataaccactttaatcccgacaaacttagcagcttttctacataggaatgtcgagaagaaaggagcatggacagtaaactgatcagttcctatagttggcagatggacccatgcacagttttcatgaattctgagtgctttccatcacagctgattgaaagggtcgtgattatcatatactgtttgccttgctgctataagaagtagctttgctattgaagacatctgtgtcttcagataagatgaatttaatgctcatatttcacattaagcagttaagaatcaagaatttatttgaaaagttctcaaattaaactactaatgtaaggagttatattaaaaatatattcatgtatagtagagtttgcagttagaagaataaaatgatgcccaataaattgaaaaccatacaaatgggaataattataaattacatagtgttattttgcccttaaagaaactcaatgtgaacctatcttgaaaccataaaatttgttatataaatgttaacagctaacatttaggagcctttagtttttctctttctattaaattgagtttctgtttttagttttccttttaaaatatcatatggatttacaatctaattgtaatctgttgttgtgaattcatttcatagtttgatcgttccagcaaatgtaactgacaaagattataggagtgttttctattcgtatgggtatgccaacttagccattagtaaaaataattagcaggatgcttcttcaggttatgtaactgttttggttctcatatgcacatgtgaaaactgtatgactgtcatttaaaataaaaacaccttacgtagacagccttttttgttgttgtctaaatagaagtcaggcaaatgctgttgggagggttgctttacactatttcgtggtgatttattttctttttaaaatactggacacattaaactcctcttaattcagtaaatacacccctgctctttatatatttattcattgtccctatgttcttggtcatatattcttatcacttgggtttcaaataggattaaaaagaagtaaaatccttgtaccattttgtggtttcttatatcagcaatgatctttattccctcatttcattgctacaaggaaaagaaatagatgtgcttaagaaggaaattgaaataagtaatactgagaatgggaggagttggtgaaagaaaaatactttgtgcccaacttaggaaaaagctatttgacccattcctacagcttccgttttcatcctgctaaagccaatagatctaactactctgttcatcccgattcagatgctaatggtgccacttctgcgaggttatagcagagtcaaagcgtctcacacgagtgggactctcagtatcaggcctcttgctgtccttgaatccttggggtttgagctctgagcagatagatcttcatatttgttctgtaagaagtcttcctaacaaagcagtcaccaaagcagcaccgtaagcggaattaacgtgggtgaactgatctaccaagtttgtgtgtgttttctcttaaaacaaagccaaataattttatataaaacagcaaccaaaataccctctcaactttccatcagacaaaatggattcaggttttgttttacataaaagcttcccgaatccaggttgtaatagcccattcttcagtgcatcctgcccatttggtgcttgctttgcaaatgttgagtagatccagataattctttccttttaagaaaaaattatactcttacattctcagcatacccaccaatatgaagatatagatacttcagtacctacactcaatagttttgttctatcagttggccatgaaacatatgaacaaaagtttaaaaactatttttttttttctggtatgttgagaaaaaccctacagtctgctacaaagttcttcctctggaatcaggtggtattaattaatgcaagaaagggttttaagtggctaaatctggaggccttgtttcttttgactgtgatttttaaataagtcacaatctctgttttgcaggattttttttttctttgacagtaaaacagtaaaacttatctgattctattttttaagtcttcagcagtgtgatttttgttttaggtagctttatttgtagctctctctgttcatagtttctgtttataagctaaaagtggatggaggaagtttgggtttgcaatggtggaagagtagaaagagcttctggtctgagagagcacagcactttaactttgaggtggtgggatcagggttaagtaaatatcacgatatattattggtcatatttaatgactcaataattgcaataaaccaaaaattatttttttgacagactgaaggacttaattgcctgcgggtcgtctgagaaaagacagttttaagtaagttttaagtgagtggagtgcagcctagcttccatggctcctctttcccactggccactagatggagaggtggtccgtgtccacagcttatccgtggtacaccgctcacttctgagtttctactggcaaagctgaactggatgcctttgaacattttatgaacacagacatgatatttaggcgatgccatcagagaatacactgtcttctataaaatcataatgtgattttcatgaaattcaaaaagatttgtttttccttagcccctgtaagtcctggcagacctgggaggccagcatcacaactctggttttaactgccacaatagcccctcttgcctctttcaaatttgtccatttagaaagggcctggaatgaatgtcagcacgacagtgccaccttgtgtccctgttgctatgagagtaactaatgcatgagccagtgaaaaggaaacaactggacattcagaaaaatatttgcaatttgttctaagccttggttttgcattaatgttacaaaaatacgtatgaagtgttttagtgtgttcgagaattcttaattctcaagaaaatattaggatctgtgtatttccctctctcatactagtattgaaaattttaaaatgctgagttcagggagggatgtatttaacttagagttagagatggagaagacaagagattttcacccagttcttaccgcttataaaactgaaactaagcacatcagacaccaagctatttcttcttttgaattctgatgggaacttttctatgcatcccttgtaataccacttctcacattcacttgtcattgtttctgagcatataggctgtgtaagccctgggctggaggatgagacttatgtatgactgtctgtcattctggaaccttctatggtactcagaatactcactcaagtcacttgaggttcacatgaatacttatactgggcagcttatgacacatttatttattttgcacacacacataatacacaacacacacacacacacacatatacacacttactttatccttctctctccaagatttaaatggttttcaaagaatttctcttggaagaacaccttttgacttagctccttttcaaacaatcctctctaactttctctttgatactatacacacacacacacacacacacacatatatatacacatatatatatgtgtgtgtatatatattatgtatatatgtatgtatatatatatgtatatatttagtttttcttctttttttaattaatttatttttttacactccatattttattccccccatccaccctctaactgttccacttcccacacctcctccccacccacctgtctccacgtggatgtccccaccaccccaccccacctgatctctaaacttcctggggcctccagtctcttgagggttaggtgcatcatctttgaacgaacacagaccgggcagtcctctactgtatgtatgttgggggcctcatatcagctggtgtatgctgcctgtttggtggtccagtatctgagagatctcgggggtccagattaattgagactgctggtcctcctacaggatcacccttttcttcaccttcttccagccttctctaattcaacaatgggtcagctgcttctgtccattggttgggtgcaactatctacctctgactctttcagctgcttgttgggtcttttggagggcagtcatgataggtccctttttgtgagtgctccttattaaaatgacattttctgtttgtgtgtgtgttatggttggctgtgcagtagtcaatgctcggtttctaatttcagcttcacaacaaaattcttgtgctaatgtgaatgagatacttggccctcctacatcagtgcataaaagaattggactgatccggctgatctgaagggtgtcaactcatgagttttggaaggcctgctcttgtgtttacattatttttgtacctttgacatctcagtttttgaattactactatagctaaaagttaaattactcattgttgaaaatattacctgttatctcatgactcagaagagaaagctcttcttacagggttacatttaaagtgggcatgggaattataagagagaggcaccgtaagattttgcattttattaaatatttagtttggttgattgggctaccaccatctttctcttttaagctataaaataagtagaatatttttaaagagcaactacttgccacctacatattatttcatgctattttaaactttattcataacttgttaaagtcagagttaaggtttaagtttcacatgtttttgtatggaacttatgcttgagttttaagtccacatatcactgaaaacacaaataaacttaggattggataattcacttaactttttaagtttgcctttataatttttaaaaagcaatagtagatgttacctttcctataaactcttatagagttattgtgaggattaaacgagtgagttcatgtctgtaaagctttcacgagtagtaaaaacagtgtacaaatactaaggagtgtccctgcaattactgctgtaactaaagaaggaacgataataaagtccaagtcagagcaacacacacagcttaagaacattcaaatctggggcattacttagaatgctcctctgtggcagcagactctttagagatgttttcgaaattttctgtattttgccttaataactagtaaatgtaaaacaagactacatctactgtctttaaataactttttatacttagtgttcacaagttgcttttgatcatatttattaagtatagaagctaatttttaaaaagtaagcaattgttatgggaaatgttttcaaacatttaattattataccatatagttcattggtttttaagcatcagggtgcataataatcaccttacagtatttcttaaattttagttatccaagctccatcaccagtaattggtcaatgaaactcaggaatcctgcattgtagctggtccaatcaattgagaaaatattagttgacttttatgtcatctacatatagtctcagatgtatcacaatcagcaagtgagttttcatatgcatggattccaaagtcacatgtatcttataaaagctactccatcagtttttattgcaaactgtgagaatgactgctttttatttttttaaggtctaatgttacaatatgtttatccttgcatccaaattcaacttcatcaatcatatgattccttaagtaaatacagctgtattttacatgtgaaaggctagtcagtactgccatatattaaaagtttagtcttgtcttataaccaaaacttacggaagaaggacaatactttttgtttttcacacaggttacttaatttatctttacctacaagtctgcatgtacagtgatagtctgtctgtgcttcagatgaaaacccctgtgtagaatccattgtgacattagttgacagctgtgtacaccaaagttgagattcagggtctgtgtttttttcactacattatattattttccccaaatctaatgaacctttatcaaattctcattatgttaagtggtagtatctaattttgggaggcataaatgtgtgtgagccacttgatataatagttattaattaaatcatgttaatggaaagaaattcttacttttccattgaaaatgatttctggatggaggtagaaataaaataccaacaatcaaaaggagcctacatagttcttctaactatagtcattgaattcttaagtagctttacttatgggattatgaggtatttcctacaagagaagaaaactaggcttgtaatggttaagtgactcatacatgattgcatatttagtaaggggcagagcttaggttaaatacggattcagtctaacattgatagcaaagttagttctcttactatattatcagtgactttaagtgtactctttacaatcatagtataccccagaatcaaaaggtgtcacatttgttaaccacaagtcacaaagtgctaataagctttgtaggatataagtttatttctaatgcatgtcgagtagtcacagtgtaaagaaactatggtctgtgtcatctatgtttgaaaataaccatgatcttataaatcaagatacatatatagtttgggaaagttttgatgacaacttaattcatatattaaacatgtatgtatgtatgtatgtatgtatgtatgtatccagatgtagtaacaggagaatgtaatcctttctttagaagaacttcaattttggggatttggattacatttgaaattctaagagtgaccttttcccaaattacactcttttaggtggtcatcttgggaagaatgaagggtagatcttaaaattaagaagtttacctactcttttttcaaatatagaaattaaaacatgattttgtagaaagtcaaatttagtaagggagtatgaaatggaaaattttgtcagtaatttatttaagctccacagggaaaattctgtaggctctttgaatatcctaaatttattttgatttgagaccagcttaaagggcatgtctatcttaaaacagttctccatttttctgaggaaaattccacaggagctagtagtgggaggtagtataccaacagtgaccctgttggggccaaataagcactttgacataactcactccttcccgatcttgaggccagcgtgtgtcctggctactgggcatgttcaattttgacagctaattttatgtctttgcaaacacagaaagtcagaaaactcaatggggaggggaaggtgtgactggtattatgtagatgaggttttggctcggagtaaaacgtgaaaacatctagccagtataggcatatgggaagcaactggttagccttgctttgcaggttaggaaggagaagcctgcatgggtaaaatgactagttacagctacacatgtgttttcagggttgagacttgtactggagctatttcttcagtgagaacattgcctggcttggtgcctctattgatgaagaaactctaacatctctgcagcctgtttcctccctcctcttttcttgctgttgctgtaatatctgaaaattattttcgtgatagtttcaggcttaggtagactgtcaggtaaattttgagcatgaaggatgtttagaacaagctgatctgtaaggccagtgtgcatccttttaagcatgtgtatcttttattcagaccatatatgtaacaatcatggggttagaaatagacatggtgtcgaataagtagagattgtgctcatggcagagctctaaatatggaaattgtagtgaacatacaaggttttaaaaacagcttcataatcatattacatggaattagagtagatacattaattagaactttagtctttgaaaggtttataacttccttagatatctcctctgcttgagccttgtgggaaaatttcaccttggttcccatcttacctgttgaggtcatatctattagtcagcttctcactgttacagtaaatagaaaatctgtggatggtgcagtgtgtgggcagtagcttcacttttccttataatgccgccttactggtttctctgtgccaactgaaaccacaacctgagtttgacttggtcaccggaagctaacccagtaactgcatagaagaactcagagggaatgtcatcatattcaacatggtttgcacacactgcagtagagtttccagtcctctaaactttggttagtgaatgtttgagttgttaccaaacatgaatgcagatcaggtagatggttctcatattgacatacccacagccatcagagccttggattctattctaagaattgaaattaattgagttcaaaaacagccatacatttgattcacaaatgtgtcctatttgccaatagcacctagtttccttataggtagggcctgctgacaagtttgtgttttcatatctcagctatggagtcagtcagtctcagtggcctgaggaggccagtggtgagggcctgcggctttgttagaagcggagcacaggcttctcacctcccatttaaattcacaccaattggcaggaagttaagtgtggttctgtaagaaatggagaatgcttaagccagaaggagctaaagtaactaaatgacatcttccaaggattctacgtatttcccacagttctcatctagacttcatctttatcaagttttcaaaataaaagatgaagttgaccgccttaaggagacagtagccttagcctacaaactctaaaattataggtggtgcagtttggatattcttggggacagataaatatgctcttatctactacaaattaattatttagttaaaattctctagaaaaataagtactgatccccaacaagttatttaggacataaaaaaagaggtagcagttcaaaattttccttatcctgtttttaaaattatgaacatagatttgcatgagagggagagatttggttaattgccatttaaatatgcagctccaggtttgtgggcatctctgtgagccaggatacaaagaccatagaaaaagattcttgtttggaaattacatttcatgtggctaaaaacactaaaggagtttcttgttataataaggtgaaagtggttaccaaagaaacaaaagtttcttatcgcttggcctgaggcaaatgtggcatattaagcttaaaatgaattcttgtctcaggagtgcacacaactcttattaatgtcttagaaattatgcatacataggagaaaaggaatagcactttcaagatacatttgagaaagcatctattggggtccagatgctgtctaatacgtaatgtggatacttaagcctcagtcagattttgctgtttttacctctcttactggggcttcacattgtgcagaacgacttgtttttgtcttgaaagggcctttctcttcatgatagtcaggttcccgggtgtcctgaaagagttaatgtagtttccaagagtgcccaacttccttccagggagtagtgagtgcatgtgagctagtctggctccaggatatgtgttcacatcccaaaaccaatttggcacaacttgaaatgtctgctaggcagaggattcagtgttgttaggccacgcaattagtgctttatttcatgagcaccaaattcacccaatagtgttttgttgtaaagaagagcctgaaattcacaataacgggtttcatttatcagagccatatgggactcaccatctttggatatatttgtaaggctttcacaaagaagaatcctgaggcatctcagatttcacggattggagggcaatctggatgaggatcgtttgtttggaaatgatgaactgtcctttcatatgtagcctccaatttcagtaatccttgagaagatccaaaaagccaggaaagagttaagtaagcctcagcttattagctttattggacaataaagaccatggtttttattcttaggtctggttcaaatgccaagtgcacctttgatgttaaaatttggccacctaatctctagtttgtgatgtggcctgtatgagagggaaggtgggttcgaagcctcaacatttttttttttgtcactttctgctagtcggtcttggtcatatgtcagtgggttgccgggaagctctgagtaaaatagtgaactgaaaatttaaccatggtacttttgatagctgataattcaacattatttctgtgctgcctcttttccctgtgatctttaagggggtgatgcaagatgttcccaaaaagtgctaatataaattgatttttaaataagtttctttgttagtagtctataaacttagatatttctcataagatatttcttctgtgattcacttggctaatactttttttttaagttccttattttacttggctattgatgacttataaactaatgtttaatcattcgttaaatataaatgcttttgaaatataaagtactattgtgtaataatgacaaccattaatttttttataatattttcagacttttgaatgttggttctgtaggtttatttatttgttgtttgggagctcttggtgctgccttataaatctggctaaatttgaatctgtgcaggtagttagtagcactgtgacagatgctgttgcctgtatgaaactcatataaacttcataagggtgctgatttcaacctttagatatgatattggcattcacttgaaataacttttgttcattttcaatattattttattgcacttgcttttactttactattattgaatttatactgaatacttaaacacttcactggttaacagtctttttattggtatgttttagatttcccagagaatggtcactgctttttttttttttcagttataagcatgttgaataactcaactttaataaaatttagcatgctctttataaaaatttcaactctacattgatactaatatacattttaaatactactttataaggagcaagatatctgttcctttccatttctttgctaatgtgcattatactgggcaagaacagtacttagatatttctgacatagcacatctggagtgggtacacatgtgctgctatagggtgtttattcatgctaggctatgagactgctgaacaataggtagaaaattggaattacagaattaaactataactgctgaaatcaacttgagcattaattgtgctaggtggttgactgtcttatgatctctccctttctctgtttcattcttagtcagatgttctcaatttaatacctataatcaatggttaaaattcttaaaattaagctttattgttttcttatttcaacaaataataagtattgtgaccaaagcagacagaatttttctcactcaaaattttattctgaactaaaaatgaactctttttgctgatgctttacatgttatataaggaattctgaaatatttcctttgtgaaagcaatgcaggatttgggataatagttgtcagcagcatcaaggagttaaaaatggtactgacactcaggttagaaaatgtagctctagataaatggtctttgagtggactttggattcactaatgaagtataggctgtgaggagaagagagagaagataggcagatggggcaaacacagaaatgtagatgtagttgtgataatcagagatgcagtcctagtgactcttcctgatgacacaggatggaggaagaggagggcagtagtggatggagtgtatgtgtagatgataacatatttggatgctgagaagacagtgctaagcaaaatggttctttgttgtttgatgtctgtagtggcccagctttctgcatttgattgaggttctcgggtagagttgggtggctcttgtaaatagtgtttatcatatacataggatcacaggtcatttgtattacataaaaattttatttgcttgtgatgactttttgagcctaaggtatagtaggtttttgttcatattttataggcagaatctctgttgttttgttcaaatgataagtttgtttacatgggcagatgtgtgaggtgcatgtccatatgggcacatgtacggaatggttacctctggctcccaagtctgttgcttttttcttctaacttttgctttattgccatccccatcccactcaatagtttctgggccgagaaactattagtttctgtagctttatcagtttatgtgattttatttcctttcgttgttttgttctctgagtttgactttacctcaagaattaagcccaaatatgatgaattttagttctcacatccaaggtgtttctatttcttccttgtccgtttgtccatatgtttgctgatccctgataggctgttcagtgaaacagcagttctcccccccccccttgtgtgtgtgtgtgtgtgtgtgtgtgtgtgtgtgtgtgtgtgagagagagagagagagagagagagagagagagagagagagagagagagagagagggagggaggaattagctaattggtgttagcagaaatattttcacatgttttataagcaaagtgcagtaaggtatataaatgtagatatgatccagacacgcgcaagctcacgactgtcactgctcatgcataggcgctcagaagtaattaatgttaataagattttaatgtgcttgtgagatcataatgaggagaaatgaatgctctgattaggaaaaggtaactgtgtgtgtgttttggcttagaacaagatttcaatttttataaaccgcaattttagaacttgtttgtgattgcatcaattggttttattttcaaattagaggtctgtttagccatttgaatgattaaccaaataaatgggtgaaaccctgatcataaggaatagtgcaggttttcatttgtaaggcagtgccactgtgtagtaaggctgtgttgtcttttgccaccttaccagtttaacatctcataaaaacaaaaaccaaaccaaaccatacacccttttccagaagccacttgtgaggacaatatgtagttttgtagactgttacctctccattctatagatggcatctataggatctataggacccagagatacagataccctcctgccacttggtggtgggataattggttttagtcatatgtatgattcttttcgaagtgtttatttaaaaagatactaaatgcccagtgtttttcttcctaaacataatctttacaaatgttagaggcttattgcttttttttgtaaagtatggtatttcaaggtaagcaaagatgctgtctcaaaatgcactccaatactacgccgccagcgatgatagactggcttaaacccagatgtcttaagcactagggtatttcttcacaatagtgtatgaaaatgagtattaacagagatttagaatgcatctgcatttattattacttttaatgataagctaatataaatgcatttaaggggctctgccccgtggaccttaggaatcacatatatagtttataatataaattatagatagagctataccccggagctcgtgtctctagctgcatatgtatcagaagatggcctagtcggccatcagtggaaagagaggcccattggtcgttgcaaactttatatgcctcagtataggggaacgccagggccaagaagtgggagtgggtgggtaggggagtgggtggggtagggtatgggggacttttgggatagcactggaaatgtaaatgaagaaaatacctaataaaaaatataaacattgttttgaaatttaagaaaaagtttggatctaaattgagatgtactgtagttgattttcaactaagttatagtcacagaaggtgtggagtttttttttttttttattatagtatttttgcttgggatttaaaaacaataggaagaggaagtgttaaaattgcttctaccaacaactgtgacatctttgcttttctgacagttttaagatttactttctattgaattctgagaatggcgatcatctcacaaaacagttctggtaatactgataagttgaatttttggatcttatcacagagatgtacaattagtaagttttcctatttctcattatgtaaagacttagttttttgttttgttttctagtgcttacatggtatcttatggtaaaatttgtcatagaatcaggtacatttctaggttttctgtcctaagtttgttgtgtgctgttttctcataattgtaaattactatggctttataatatgttttaatatttaaggtgttcattcccttctccaattccctcattactcttcttgttcagttttcttgatcagttgttattccaaataaacactataatcagccagaagaacttgtataaaagaaaaacaaaaataccttgtgaaaattctcatgtaattttagatgtccctgacttgacacaggcacaatgattatctttatgggagtaccatctcttatgcagaagctgagtttcctcccatatatttaataacttttgtgtcttttaactattctatggtctttgacatagagatttaaacatttgttattaagtttcttatatagtcttatgtttttctcttaactcatttacttagctttttatatacttaaagtcctatgaagtgtcttctctcccatcatattttctactagctatgtgtttcaacatggagagacgcctgtttacatgttaactttatggcttcctacgttacaaaatgattttacttgtttgtggtggcccagggtagatttgaggctgattacggtacataacatctgtgannnnnnnnnnnnnnnnnnnnnnnnnnnnnnnnnnnnnnnnnnnnnnnnnnnnnnnnnnnnnnnnnnnnnnnnnnnnnnnnnnnnnnnnnnnnnnnnnnnnnnnnnnnnnnnnnnnnnnnnnnnnnnnnnnnnnnnnnnnnnnnnnnnnnnnnnnnnnnnnnnnnnnnnnnnnnnnnnnnnnnnnnnnnnnnnnnnnnnnnnnnnnnnnnnnnnnnnnnnnnnnnnnnnnnnnnnnnnnngtcacttacaagcaacaaaaatttatttgttacagttttggaggctgaaaatctaaggctgtagctagcgttggcaggttccaaagagggccctcttccattttggagactgctgaattctcttgtctgctctcatgccagaagtgaacaaactagctctttgggatttcttttgtaaggcacagttcccactcttgatgacactgacaccatgatctcagctaatcataattatgtcctaaagctccctctccagtgttgtcgtctatcggttcagcacctgaattcctaggggcaggaacgtgcagattgacttcactgccactgacgtggatcccacatttgcaaattatagcgcatcagtttatcgatgatcaatcatagaaatagaagtgattgtctggaaactttactaataatttttggttatgcttatgaattcatgatggttaagtattgaacacataagaattcatgatggtattcattaaagaagactcttacttcttagcgttatataagacttcttgattaacttgatgaaaaaccaacaatgatattttagtagttcagtgtcttttaagctccaactctaggttactgaaatggatattgtcttatacatcttttaaattcatttaatataatctattgttgaaaaagaatttattactctttcaaggttcatattatttctatatcttggttgtgataaagagtaaataagtctgataatgctttggtagttgtttttattttaattattttattattaccttgtctattcttagtttgaaatgcttacacatgtatttcacccatattcttactagtagtgttgctgtatgcttcaaataaatatgtgaaatatcctctgtgtgtgtgtgtgtagtcatgcaagtatgtttgcagacatgtatatgtgtatgtacatgtatgtgtaagtgtgaaatccaggttcaaaacagcatatctttctttacttgctttccagttttcctttgagatagggcttcctcactgaatctgaagctcagatgttcagcataataacttgagggatcctcctgtctctgtgttcctctctgctaaggctgagattaaggctcatgacagatttttttatcgtgtgttttgggaacttgcactcaggtctttgtgctttcacaggaaacatttgcctccctgatccatctccctagtgctgaaacattttaattagcactaaaatacagacaaaaagtggcacatatgaatttgccaatattgataaaagctaaaggtgaagtatgattatatcagtgaagcatataaaaatctttagctgcttttgaatgaaatttctgagaagctgccggaatgaagaataatttcttcaaagaatcgtgggtccgttctgtttatagtttagattttgccagaattttggcttagcactgagtgaaagtattctctacagcttctctttgctcttttattccctaactcatgtcagaaacaacatacaggatctgtgaggcacaaaggagttttatgtcttgtaaccccttatgaatcctttatgaaatcttctatgacaatcctttatgggttgtcttcgaaagtctcggtaattgaggcaggaaattagcattgtgtttatggtgtttggacccagctattaacccttcctctgaaatttataagttgtgtaactttctgcaagttacttagattagctgtacttcctttttcttatttacaaagtagtaccttgttgggaactaaaaaaagggggcccgggggaaggtggggagaaaaggcccactcccagccagagtttccctattctctggtcagtcaggtgtgggagggctgcttcctaccctttccactcatctctgggtagacttgcctctttcccactcttcagggggtggccaaggggcacccctgcctggggaccagagctaccttgctaaattcccggggttataagagagacagataagggaagaggttcccaacactgaccagagtgcgcagcgcatcttgatggagcagagactctctatggtttaagagctttatagaaatgcagggggaaagagagaaggtaggaggggggggagaaaggctagagagaaagagtaagagggagagaggagaggagaggagacaaagagagaggagagaggagagaagacaaaggaaggggagagagggtgacagtgaggggtaagagggagacaagagagtaagcagtaagagggggaagtggggctgaacagccctttttatggtcttcactgttgctagataactggggaggagtttagcctgaaggtcagaagcttgggccattgcctatgtaactactgaccatgcttctcttgtgggggctgttggggcggtaacttaagcaggagccagagttccaggagcacgagggaacgcctaccatgtcatgaaggtgaattatcaccactggggttcagacctcagctcaattgaataccagcctgcaatcccccacagtacctgttgtataaggttgtgaggattaacagttatcagtataaacaatacagagaagcagcattgtgctgtctttgtaagattcaatttcagttgtctagaataaatattcagaagtggaaatgctgtgtcatttgataagtatattgttaattttgttaatttgagaaccctccatactgttttctttagtggttacaccatttcatacctctactaacaatgtgcaaacctacaacttcactatattcatacctaaacgtggcttttattttgttgaaagccagtgagtgaaagatgatacctcctcattgcagtttgatttatcatgatgaagactggttacattgagtatttttaaaaataatttcttttatttttgagataaaatttaattttccccctttccgttactctggccaagtctcccatatagcccaatgctcttctcaaggtctaagatttcatgacttcctgaaccaccaagtaaaaggtcatacgtgttattactgttatattggaggtaagtcccaacaaagaaactgctgagtaacacattcataacttaactatatataacatagcttaacatagcttgggcccgtttataaagattgcattaccgtggtttaggtttcttttgttgttacatttagctattaaccttttaccagatagatagtcttctcaccctcttgattgttttcttggctgtgtagagattttattttaatgtggtgttcacttacttgctgtttagaggtttttattttgatgtggaactgagtgttcagtttttctctctttgcttttagtgtcatacctatggaatcattgcttacttttatattcatctaggaattttatattttaatgtctatgtgtaactctttatgttgagctgatggcagtgtacagggtaaggtaaggacctaatttcatttttattgtgttgtatggatatccatttttctaattatatcttacataagggacagtgctttgcccattgtatattcttagtttccttatcaaagattacttgaatctgtatgtgtgtgtatatttatgagcactctgttatgttgcatttaccattgtcagttttatgccagtatctaactaatttcttttgctgtataatattagaatttaggagaatgatgcttttagatttatttgtttctgtaattgatttggctatttatgatatttactggttcatatcaatcgtaagtttgtaaaattaactctgaagttcacttttgcaatttataatccaaatactgtttagactcctagtccatgaacaagctcttgctttccattagacttgttttagtaacttttactagtcaatgttcttagttttcaatacccagtcttttactttggttcattcttaagcatttttgctgctgttcttatgctcttgaaatgggaatattttccttatgtccttttcagagaggtttttttttttttttgacttttttctttttatttgtcttttagatgtttatatgcattttgataatatttactaccctaattattttaagatccaccatcctgttcctatccccctttgcatccttcgttttctttttaacctatgaagaccactgtgtgctgctcaaatatccttgggtgcatgatcttccaccagagcgtggttgacttaccagggactacacttggaaaaacaactctcctctcctcctgcagctagcagtgaccaatagctccatggctagggttaggatttcatttccatctcacacctacaaatttattttatttttgacacctaccctgactggagtgaattggaatttcagtgtagtttttgagttgttgagattgcttccatgtgtttattagctgtttatacttcttctttatatatatatatatatatatatatacatatatatatatatatatatatatatatttattaggtattttcctcatttacatttccaatgctatcccaaaagtcccccataccctcccccctactcccctacccaaccactcctgctttttggccctggcgttcccctatactggggcatataaagtctgcaagtccaatgggcctctctttctagtgatggccgactaggccattttttgatacaaatgtggctagagtcaagagttcctgggtactggttagttcataatgttgttccacctatagggttgcagatctctttagttccttgggtactttctctagctcctccattgggggccctgtgatccatcaaatagctgactgtaagcatccacttctgtgtttgctaggccccagcatagtctcacaagagacagttatatctgggtcctttcagcaaaatcgtgctagtgtatgcaatggtgtcagcgtttggaaactgattatgggatggatccctgggtatggcaatcactagatggtccatcctttcatcacagctccaaactttgtctctgtaactccttccatgggtgttttgttcccaattctaagaaggggcaaagtgtccacactttggtcttcgttcttcttgagtttcatgcgtttagcaaattgtatcttatatcttgggtatcctaagtttctgggctaatatccacttatcagtgagtacatattgtgtgagttcctttgtaattgtgttacctcactcaggatgatgccctccaggtccatccatttggctaggaatttcataaattcattctttttaatagctgagtagtactccattgtgtaaatgtaccacattttctgtatccatttctctgttgagggccatctgggttctttccagcttctggctattataaataaggctgctgtgaacatagtggagcatgtgtccttcttaccggttagaacatcttctgggtatatgcccaggagaggtattgctgaatcttccggtagtagtatgtccaattttctgaggaacccccagactgatttccagagtggttgtaccagctttcaatcccaccaacaatggaggggtgtccctctttctccacatccttgccagcatctgctgtcgcctgaatttttgatcttagccattctgactggtgtgaggtggaatctcagggttgttttgatttgcatttccctgatgattaaggatgttgaacattttttcaggtgcttctctgccattcggtattcctcgggtgagaattctttgttcagttctgagccccattttttaattttctgggttatttgattttctggagtccaccttcttgagttctttatatatattggatattagtcctctatctgatttaggataggtaaagatcctttcccaatctgttgatggcctttttgtcttattgacggtgtcttttgccttgcagaagctttgcaattttatgaggtcccatttatcgattctcgatcttacagcacaagccattgctgttttattcaggaatttttcccctgtacccatatcttcgaggcttttccctactttttcctctgtaagtttcagtgtctctggttttatgtggagttccttaatccacttagatttgaccttagtacaaggagattggaatggatcaattcgcattcttctacatgataaccgccagttgtgtcagtaccatttgttgaaaatgctgtcttttttccactggatggttttagctcccttgtcaaaaaccaagtgaccataggtgtgtgggttcatctctgggtcttcaattctgttccattggtctacttgtctgttgctataccagtaccatgcagttttcatcacaattgctctgtagtacagctttaggtcaggcatggtgattccaccagaggtctttttatccttgagaagagtttttgctatcctaggttttttgttattccagatgaatttgcagattgccctttataattcgttgaagaattgagttggaattttgatggggattgcattgaatctgtagattgcttttggcaagatagccatttttactatattgatcctgccaattcatgagcatgggagatctttccatcttctgagatctttaatttctttcttcagagatgaagttcttatcattcagatctttcacttccttagttagagtcaagccaaggttttttatattatttgtgactattgagaagtgtgttgtttccctaatttctttctcagcctgtttatcctttgtgtacagaaaggccattgacttgtttgagttaattttatatccagctacttcattgaagctgtttattaggcttaggagttctctggtggagtttttagggtcacttatatatactatcatatcatctgcaaaaagtgatattttgacttcttcctttccaatttgtatccccttgatctccttttgttttctaattgctctggctaggacttcaagtacaatgttgaataggtagggagagagtgtacagccttgtctagtccctgattttagtgggatttcttccaacttctcaccatttactttgatgctggctactggtatgctgtagattgcttttatcatggttaggtatgggccttgaattactgatatttccaagacttttatcatgaatgggtgttgtattttgtcaaatgctttctccgcatctaacgagatgatcatgttgtttttgtctttgagtttgtttatataccggattaagttgatggatttccgtatattgaaccatccttgcatccctgggtttaaacctacttggtcaggatggatgattgttttgatgtgttcttggattcagttagcgagaactttattgaggatttttgcattgatattcataagggaaattggtctgaagttctctatctttgttgggtcttttggtggtttaggtatcagagtaattgtggcttcatagaatgagttgggtagagtaccttctgtttctattttgtggaatagtttgtgaagaactgggattaggtcttctttgaaggtctgatagaactctgcactaaacccatccggtttcagaggatttgttattaacatatagaaacacaacttatttttgctcattgattttgtgtcctgaaactttgctaaatctattagatcaaatagttttgtctttctttctggagaccttttaagatttttttttctaaaagaagattttgatgtctacaagcagacagctttactttttttttttctaatttcaatgaccttttttgtttattttattttattttatttttgctttgacttgaatagaagaggtaagagtgaaaatttttggaaaaatattcaattctaactaatggaaacttcccattgcacttttcacacgtggaatatattctttcaagatacatttcttcccttgctgtttattcaaattattgaaaccaggaacttgcttgagatgtcacaactcctatgtccatgtggcactattgacaattgccacagaatggggacagcctaaacatcttacagatgcatgatcaagaaaatgtgacactataaattgtagaatattacccaatattaaaagattagaacattctctaatatgaagcaacctggatgaaaactttgaatgttatatactagccagtcacagaagaacaaaactatatgattccacttatatgaactatctaaaatagccaaattacttgaagtgacaaagagaatggtgtctccataagcaggagacaggaagaaatggggacttattaataaataggtataaagtttaattaggcaaaataaaataaaggaccagagacttactctatagcatgatatctatgtagtcatttcacctaacaatatcatacactttaaattttgcttaaagtctagaatccaaattaaatgctcttagcaaaatagtgtaaaataatacaatacagtaatttttcaatattagttaagaatagtaattttcccattgaattctcttcactttacaggactcttctgagtaacagtggttctcttaaagtataacctgatctgaaatatacaatgcagtgttagaatcattaataacatgaggtaatgtttttgttgttatgtactgttttccttcacttcctgtgttgattatttttaatcctcttgcagtgactatcatctgttggctcaccatttgtactcataacaaaacactatggtaaatactctcttactattctttccaacaaccccaaagaattgatagtactttgctcttctctctacctgggagaattctaagggtaaatgtgattaacttctccaaggacccctgtctagtcaccaccgagttcacctgaatcagtgagattaaaaaaaaagtgaactaataactctaacttgagcatcattatggataaggaaaggggcctttcacttctattctgtaagcaaagatggtggttttagccagtgttctattctgtataacaagcaaatttatcatccattataccctttgcctcttacagaaatgatcaatacctattcctttataatgctttaaactccagagtaacattgaattccatctaaagagtaaaataaaccaattatgtagtatcatttcttaccataaatggagaactctgcaaagtataaccaattagaaatcccctgtctggttagtttccagaatattcctaagtcagtaaagaatgaaaagcccatctcttccaagttctgctacaaggaagactggagttgccttagcttcaaaaggatactttcccaagtatttcaaaatgtccgcagagctgccccagcacttcagtttctttggaagcctctttgttgtcctcatggtacatctctctggcatgcatgaccagatgcaagctaagccctgtacaataagaatgctttcatcctttgtgtgatgtgtttcattttcaaagtttgggtgatcctcttctgctgctgcagcagcaagcattgttaatttctgtaggaggcctggatgaacaagagtattcctcatagagagcctcttggaactgtcccttcgtgccatgatgcttcgttagagtactttcccctgctcgattaatggccagagaaaagaggagtgaacagtaacccaaatactccaattaaaagtgtttgacatcactgatgtccatactgttgttttctcagcttcccaaactctgcttaatttctggtagaaaggaagactataaacatggttattttgttaagattcctatttatatataaacacatcaactttttataacatggagtaatagtttctgtttgggataatgtggttgaattctttcctgttctcttgaccttttccctgtcaccaaatccactgtcaggacaccattataggacactactgagcatgtagatttcatttctttaacgggaactacattagttcatccagcactcttttatttctttaactgtctgtggaccaagttcttctgcttacttttggccttgatcatcaagaaatctctgttcctgctcttggtgttgccactataagtaggaaagtaatttaggcattgtacttttgtgctttgtgcttaaattcagggactagcacctatgataagcaaatgtcctatcaatgagctccccgaaacctaacatatagatttgtgagtttcttattgtgattttaaaaataacttctctcaactttaaagttttgtgtgcaaaatataaagtaggatttccagtactaataatttctgtgttcatacaatgattaatagtttacattgtttacacttattttatatatttttaagcatgtgtctgggaggcaaaaacaactgctttgtcgctctctttcaaatatctagttcaaggagatagagtaactcatcctacatcaataagtttgaattgactgaacctgaaattgaaatttagatttaccccccttctatgatgtatggatttccctgggaggtacaatgtttctcccttgaagtgtaacttcattaattaatatttaatatgtgtatgaatatatgcttccttatacagtattgaatttgaggtaaaatttgtgattttatttttaattggtgaagtctcctagatttcctaattaaaaataacaagaaatatgttacctttatttgtagaatttctgatgtcactatagaaaagctattttcttatatataaacatagtatttcagaattaaccttttcaataataatatttataattggggagggataaaaatataagaaaatccctttgagtcaatcattttccttggacagtagtgtactttgaaaacaatggttcatttttgtttactcactattacgcttgcttattcaaagtgatttatgtttgtttttgagaagtttttaaaaggtgtttctctgaaataaattgtattttaaataggtgcggactagataactgtgaaagattgcctagagtgtgtgtgtcattgttctgtagtatctggagaatgatttctgataaccatactttagattttgaatgtgtgttttaagtatattttaagccaaagtcaaaagatcggtaggaaatgatagatagcgaaacttccaattagacccttaagcccccagcagaattgcactggaagctgaggcagctaagggatagctcctgatacaattcttgtcagagcagtgttgccttgtgtgaggcttccaactaaaataacaaagacctatagctaagagataatatcatcaaggctattgctcacagtttccagcagaaaccacttggctaagtccaggtattcagctgacttcccttctttccgtgtgagcatcctgtagctggactggcagcttctgtttctcacatgatggaatgaacactagtggcatctgtttgaagtggctcaccttctcactgtttttaaggacacagtgttttaacttggctgcttttttgtcctttagtcacagctggccagtgcccagacaagaggccttggagggcactttgagaaaaatgtgctcgggtctgaaggtggcaatatggggaataatcctgtttccatttctacactctgcttcttagtaagttcaagcaatgcagtggcagtttatcagggtagttgtacattacaaagatgaatgtaagaggtcttgattgatccttcatttaacttgtcaagtttgtactgactttaaatagacccaaactggaaatctccatgcccattatagtacaacttaagtaggaagaataattgagaactctgtagaaaacccatcttatcccatcccccagtttttttcaggatctatgagaataagaagtttgatttttttaatcagaaaactctaagcctcagattgcttgtgatgtaagtaatgagctctctatgtgttatctgtttgagggttatcagtaacatcccggttgttgggagtttgtattagttgtggagcgctcccacagcacctgcttccacaggctagacctctgcactgtgtttctcactactgaacatttagctttacacagtcttctccacattataagcaaaacagataaaggggcagcccaggagtgggtgggcaatagacagacctgtgactagcatagctgtgcttgagtagaatactgtctgtcgtacaagtagtagacatgtgctcggttcccacatgcttctgctgttacattgctagaggtttcattaattaattcagttttagaaattactgtttttgagtgagtggagattgagtttttcttgggttacttactgttacaggtgcatacactatgtaatttcacatcttgtttaattcccattggcaagttgctcatgcttcgaaaacagagacatcagtagtactgctgacagtttctttgctagtgtgaatgttatagtgacagtggcatagaattaatggaatgttaacgtaaaatcaggacctctcatagtttcctctttgatttgaaggctattgtagttgcttcagtgatgatagtgtagcaatgaacacacttcatcaactatttactgtttctcaagtaagtatctaatatttagagatgacttacatatttacaaatataccagttaggacatcagaatataataaagtcataatattatattaacacctgtttaatattcttaaataatgtaattttcattactggtgaatctttgtgcctattatgcattcaagtctgggtgttcttcaagttgttgtccatccttagctgtcttgctgctgctgagaaaagggaacactgtctttccatgtcattgtcatagcattgggattgcctgagtgatttacaatgcatgaattttattactatttcttctctctctttctttctttgctttcatttcaatcatttgtttttagcattttgctctcaagatgtgccttctagtattttttttctgataattcattgggaagtattatctttttatcttacacactaattacttagttatatcatacacattttagacattttggttctttagccatttccatggagtaaatatgaagacaaatatagagcttttaaagctattctcccacatagtggctttttaaacgtgcgatcatgttatatacagctgtctacttggtctactaggaattccagggtttgcacagtagttatctattcagtctacctttttgttaagtgtgattttttttttttatggaagactgaagacactttattttttcatatgaaattcctttgctcaacatgataatgtagaacttatttagtatttcaaatataatataaaatatagctataaatgcattatattatggtaaaattttagtttttatagctaatactattttaattatattactgtgtttcattttgatttcttttgtttgaaaagaagagaaaataagttgttatttgaaggtgaaaatttagggttagtagaaatctaacatagttttaaagacgttttacttatgttcatgaatgttttgtgtgcatgtatgtatgcgctgcacacatgcctggtatcttctgaggccagaagatggttctagatctcttagaattggagttactgatggttgtaagcatttatgtgtgtgctaggcaccaatgaaccatctctccagctctcctacagatgtaaaaaattttggctaagttttagttcaataaaatgcatagtatgaaaaacccccacatagtatggaaccataggagatcaagatgaaggaatataaaggggttgccatgagtgccacagtaagatgtcagagatgggtgggatccattaatggattttaagtaagaaaatgttcttttttagttcttttgagacagatatttcattaataattgtggaagaagggatataaagaggtgagactagaatctctgagtaagaagacagaagttaccaggataaaacaggatgaggcttgaagtgagacaatgtctctgaggacattgaagagcttgctaggaggtacagttgatgagattgggtacattctgagtggaagagtgcaagtgagatgctgttaaaaaaaatggggagtttaggatggcttattgacttgttcctgaagctaccacagtggtgtcatttagagagtaaaagaccattttaaaataagttataggccagcgataggtcatggagtaagtgtgtgcatatgtgtgttagaataatgtgtacaataaatttaccttgctgtaagaaaacagcatttgactctgggacttatgtgtctgaaacttacagtgtctgccatgcagaagcaggctgagcagagtttcctagaagagtattgattaagaagggcggggtgggggtggggcggggagggtatggggacttccgggatagcatttgaaatgtaaatgaagaaaatatctaattaaaaaaaaaaaaaaaaaagaagttttccaaaaagagagtggcagaatcagatatttcttctgaggttattcttgcccagagttttttcaaatttaattttatttttaattcattttttacactctacattccattccctgcccctccccatccaccttctgaatgctccatatcccacacctcctccccagcctaccccatctccacgtggatgcccccaccccacctgacctttaaactccctggggcctccagtctcttgagggttaggtgcttcatctctgaatgaacacagacctggaagtcctctactgtatgtgtgttaggggcctcatatcagctggtgtatgctgcctgtttggtggttcagtgtttgaaaaatctcaggcgttcagattaaccaagaccgctgatacgcctacagaatcgcccttctcctcagcttctttcaggcttccccagctcaacaactggggtcagctgcttctgtccattggttgggtgcaaataactgcatctgactctttcagctgcttgttgggtctttcggaaggcagtcatgatagatcctttttttgtgagcatcccatagcctcagtaatagtgtcaggccctgggacctccccttgagctggatcccactttgggcctgtcactggaccttcttttctacaggcttctctccattttcatccctgtaattctttcagacagaaacgattataggtcagaggtgtgactgtgggatggcaatcccatccctcacttggtgtcctgtctttctgctggaggtgggctccacaagttcccactccccactgttgggcactttatcaaaagtcctttcctatgagtcctgggagtctctcacctcccaggtctctggtacattcgggggagtgggggagggggtaggtcccccaacctcctatatcctgaggttgcctgttgacattccttctactggccctcagggcttctgtccttttccctcacccaatatcatatcatgccacaggggcacctgttccattatgttcatagcagccttatttgtgatagccagaagctggaaacaacctagatatcccgtgatagaaaaatggatacagaaaatgtggttcatttatacaatggaatactactcagctgttaagaatgaagacatcctgacttttgcaggcaaatggatggaactagaaaatatcatcctgagtgaggtaactcagacaccttccccccaaaaaaagaaagagagaagaaaagaaaaaaaacctatacggaatacacaagatacagtccaccaaattcaaaaggctcaacaagctgaagtaccctgaagtacaagtgaggatgccttggtcccacttgggagagagaagaaagcaatcacaagtggggagggaggaagggagggacttgggagggattgcccaaatattttaattgaagcttttccccattctgctttctgaatgttaaagtagtgaacccaaatgatttccttaccatagaagttttgagcaaatagttactgtaagggcatatctagatgaggcccagtagaatgctacaaaataaaactcaaggtacacaggttgctagttaacttttcacagaccacatcccacgggttttcattttcttctttctttctttctttctttctttctttctttctttctttctttctttctttctttctttttctttctttctttctttctttctttctttctttctttctttctttctttctttctttctttctttcttccttccttccttccttccttccttccttccttcctctctctctctctctctctctcttcctctctctctctcttcctctctctctccccccctctctcttcctctctctcttttttccattttctcatttctaaaatgtgcacatctgggccaaagagatggcagagttcctaaggctccattcacaactaaaaatataaaatatgcacatgagataatcttgggattacccacagtgcaaaccctatggtgttaacaccttgtcaatggcttaattacacatgatgagtcagccttttcagagcctttatcagaagtctttcagttagggatttagtgtttatttcccttattccttcatagtgagggattaaacaattaaataataaaaggaaacctataagcataaggaattggaaacaacatatgaaagagatagaagatttggaaactataagagagaaattaccgcagtgagaaagctgaataaatggaggacattgtatcaattagaagtaagctagttcctaccctagaactcagggattgtatgcactgtgtcccatgaacagcatgaacaaatgcaattaatatagtagaacatggtgcttcctgaaacatgacaggataacgtagaaaaggataataaaagaatgtgtatttataatatctaagagaatatacttaaagaatatttgagttttaaaaaatatagtgaaaagtttaataatagaaaatagaggagaaaatataaagtcagcaaataatctaacaagctaaaaatctaaccaacaagatttctagatggtagagcagaatgatagtaaattattataaaattataggatgaagttttgatattaaaatatgcagtttgtaccttgaaagtgtcttctgaatacccataaaatataaagtaaataaccacaaaggtaagtccatagaaatgcttctagaatgctgtaacttctagaatgctgttaatgagcagataacagaaaattccagagaaaaaaatataaaactgtatgtcatcatgaaaatgggaatgggaccaatcaaaggtagaaatcatggctttaaaattctgataaaattatgtttaagatgtcgctctgtacccagtcaaatgtctaatcaagtctgagttaaaacatattttaggcacatgctctaacacatacacatcctttcctttctgagaaataactccaggggatgctataaccagaaaggagtagatgggaagaaaagaacaatacaagagttaggaactgaaggtggggagaggaacagtaaggagaggactaggaatcatggctctaagttgtttctgagaatgaagatggaagatgggaattccagaaaaggatttcctcactataccgcatttgaatcaaatcctccatgcataagagtgtggaatgttaagagaatattaagagaggtttatattctgctaatgatcttgggaaaaggagtcaagttacaatattcctactcaggtaggaaacctttcagaatagaagagaaaaacagaagagaagcaattactcatcttccaggaaaggacattaatatttatattatgttgaaaatttataaaccaagatagcaagagggtcaggaaatttgctagtagattgtgtcccctaccacaaaaaaagctgtatctgtaaaatctcacaaacatgatcacccaaatcagagttaaacacaggacatcaataaatatgccaaactacatatgggaaaagcccacaaggcctcagccatacactaagaactataggcaaatgaataaagctggaagtgggagaggtggccttccccacggaagcgtacactaattggttgtccagtgacagatggtcagcctgaaaacatacatgctacacatacctatacatgtacatatacatacacacacacacacacacacacacacacacacacacactgaaggagagaggcgagacataatggagagtttaaagggaggaaaaggaagagagaaatattgtaattcaaatacaatctcaaaaataacaatgaaagaaataatgagattatcaatacagtggattctggagcatactgaaaacttaggttatgtaggtgattttgatgatttttgcggtgcagggggttggtggcagacagagttttactctgtagtcctggctgtcctggaacattccatgtagactccactgaccacacattcagagatctgcctgcctctgcttcatgactgctggtattaagacaatgtgcaatccatgtccggcttggagttttttttgtataaattatgtgatggcatttaataaactttgtaaatgtattattgctttgaaatactaaggaaagaaaaacttgaacaattgaaataaattagggccaggaggtgagtcagagggcttggcaggagacaaaggaagggaaaatgatgtaattgcagtataactcaaaaaataaaaatattattaaaaatatttaaatcttaaataatactttagttatttacacagctttctgtgtctgtttttcgttttgttttgttttttgtttttggttatttttcacggattggaaagagaggagctcttgcctgagaaagtcagaggacagctcgggagggtcagtttgttccttcacagcgggggtcgggggggactggaagattgaacttaggtaatgaggcttggggtcaggcacctttactcttccatcttctggtcgtcagcgtaagagtgtgaatgctgtgttagtggtgattcgtaccctcgatatattccatgctgaaatcatagtctctagtgtgatggtacttgaacaagggtcctttgggtgaggggtaattaggtcatgcatatgggactcctgtggcaggctaagtactctgtggaaagatgtattccttttgtctgtgttcctcatcacttgagcacacagcaaggaggtggtttttatgcaaaccaggaagaggcagtcagtgcaatgccaccatgctggtgtgctggtcttagtcatgcagcttatgagctccaagaaatagactgctgtctatcacccagtcagctagaagactaactcagtgaagcacgggtgagtgtgtatatatttatctgtagcaataaatttatatgctgaccctgatgacattttagcatcctgttattgatagtattatcatttgttaaagatttgttatgcgtgctttatgttaaaagttagatagagaaatctaataattgtttctacatttttcagatattaggctgtgctcgtaaaaaaaagatactaccttatgaatatccaaggtgatatataaagtgacagaatctttaatcttatttgataaatcagtacatttattaaatgaagaacatcctattctgattaatatttaagtacttaatactttttttttaacacacaaacttgtgcttagtgcacgaactctcatggaatgcttttaactgttcactggttcattcatctatggttaatataaggcacttttgttgtgccttacaaaatgtggagttactcaattcagtgcatgcagttaagaatttagattatccttcaataatcagaaacatgctttgccaaaaatccagtctgagtgtgctcaaaatatcaagtgccttttgaagattttaaataagaactccacaataaaaattcagcaacaaacaaacaaaaagcccataacaagtttgatagacaaaagtgtttagcagacatcctcaagccttcttgagaatttttagaaattaagagagggagaggcagagaacaaggtagataaggagggagtggatgcctttcctttattattattattatttttaccaaggacatttggtattgagagaaaaaagggaagacgacaaatgaagaaaggacaggatttgcctcaaagatttattttgtaattgattgtagcttataaaggttttcattgaaggagaataggagggaggattgtaagtttcaatgccgaagctttgaagagttgccctgttgttgcagctgcttgggcaggctcgctcaaacatcaatggtgcattgtggcagttcgttctgcttccctgtttctgatggacattctccaggcagtgaagggcaaaagggctggcaatgctactaagcagcataatagaagttgttggactagttttgagtatgtgtatagcagaacacttgatgatcgattatataatatggtcagtctacactggagtttagaaagcactttctggcaaattagtgcaagcaagatgttttatactatcttcttgttgtatagagtgtatgctatttagagattgcatagtggtcagcagagagaaataatgtaggtagtataaagaaaaaatcagactatatttagactcattcacaaattttcctcatgaaataaaaaaatcacaattttgacttctgctgtttatagtctcatttttaaaggatagccatatagaagataataaactatattaaaattattctagtgttttttgttttctttactaaatttttggtaaattttataattttattgtccttttattaatatgagcttttttacttgctctttgatgaccctgaaaataagaaaagctttctcattttacaggtgaggaaacagacttagaaaagccaacaactagttttgagcagaagatgaagtaattaactttctcagttaatcattatcttatctccaagaagaaggtgttattgcctcctttttttttttttttttttttttttttaacatatttcagatgaaattaaatacttccctcttcggctagagcacatggaatccagtactgagaactgttgcttcaaagctcattctttttctactgaatgctacaatgaggagaattgaaaagtgtaatgtagaggcaggcagatttctgagtcaaggccagcctggtctacagtgtgagttccaggacagccatggctacacagagaaaccctgcctcgaaaaacaaaacaaaacaaaaaacaatgtataaaaaatttaaagatagtgaaggattctataacttgtagactaaactttatctcaagtaaaatgtctgagctgagctaatgaatacataataggtgccatgtagaaaccgagacatatcagtatatatatccaagatcattttctgataaagttatctagataattagatgagaaaatgttataaatatgtgctatcttcatgtaaggatatgaccaaataattacagtatatttagattcatgtaggtggtttttgattttgttttcttagtcaagtatcttattaatgtcttaccaaatacaaagtagtacccactatgagaattcttttctttttaattgggtatttatttcatttacatttccaatgctatcccaaaagtcccccacacgctcctccacccactcccctacccacccactcccacttcttggccctggcgttcccctgtactgaggcatataaagttttcacgaccaatggacctctctttccatggatggctgactaggccatcttctgattcatatgcagctagagacacgagctcgggggtggggtggggggatattggttagttcatattgttgttccacccataggattgcagatcccttcagctccttgggtactttctctagctcctccattgggggccctatgatctatcaaatagctgactgtgagcatccacttctgtgtttgccaggccccggcatagtctcacaagagacagccatatcttggtcctttcagtaaaatcttgctagtgtatgcaatggtgtcagcgtttggaagctgattatgggatggatccccggatatggcagtctctagatggtcaatcctttcatcacagctccaaactttgtctctgtaactccttccatgggtgttttgttcccaattctaagaaggggcaaagtgtcctcactttggtcttcattcttcttgagtttcatgcgtttagcaaattgtatcttatatctagggtattctaaatttctgggctaatatccacttatcagtgagttgtgccagttcttttgtgattgggttacctcactcaggatgatgccctccaggtccatccatttgcctaggaatttcataaattcattctttttaatagctgagtagtactccattgtgtaaatgtaccacattttctgtatccattcctctgttgagggccatctgggttctttccagcttctggctattacaaataaggctgctatgaacatagtggagcatgtgtccttcttaccggttgggacatcttctggatatatgcccaggagaggtattgctggatcctccggtagtactatgtccaattttctgaggaactgccagactgatttccagagtggttgtacaagcttgcaatcccaccaacagtggaggagtgttcctctttctccacatccttgccagcatctgctgtcatctgaatttttgatcttagccattctgactggtgtgaggtggaatctcagggttgttttgatttgcatttccctgatgattaaggatgttgaacattttttcaggtgcttctcagccatttggtattcctcgggtgagaattctttgtttagctctgagccccattttttaatggggttatttgattttctggagtccaccttcttgagttctttatatatatatattggatattagtcccctatctgatttaggataggtaaagatcctttcccaatctgttgatggcctttttgtcttattgacggtatcttttgcctttcagaagctttgcaattttatcatttttttgagattataatgcaatcacatctctcctttccctttcctccctacaaatccttctatgtatgcttccctactctgtttaggcaactgaggaaaactgggcatgggagagggaattcccaaaggaagagcataccatttggttgtccagtgccaaacgatcagtcttgaaatcacaccaatgagtaacattatacttattgaaaaagctccttattatttaagaataggaatgtatgagcacacatgcacatgaaaaacagttagtgaaaatatggtgtatgcatttggaaaagttcttttaaaagagagtatgacatcagcgtttttctcagtgactaccagttggaaaagaagcaaaaaaaaaaaaaaaaataaaaataaaaataaaaataaagaaatgtgtcgactgaatggcaagtatcttattaagcacactcagcatggatctagggaaggcgtgattggcagaggtaacattttaattggatcttcattaacaatcaggatcttcttacaacaaaatagagaaaaggatcacaaaggagtaatattagctcacatccacggaattgtatttgttacttttcacatcaggacaacagaaatacccgctatgatacctgaggaggaacaggtctttttgggtcacagctttagacacctcaatctattattaacttgacccatgtatttgagttgaactataaggcagtgggcatgcatggcagtaaaaatatataaagtgattagagaccagaataacccttaaatgtccccattgacccacgccttccaactaagtctgcctcttgatgtatcgaccacgttcccaaatgaagaccaagacacacaggcccgggggtggggtggggacaattgcggttcaaatcatagcattttgcccatgccttcaaaggttcatggatatctcataatgaaaaatgcatctttagttcatctttaatagtcctcaaaaatctcaacattactaacaacattcaaatatccaagactgtcttaagacttgggatatattcttagatgccagctctgtaaaaattcaaaataagttattgtcttccaatgaatacaacacagtaaacattgctgctctgaaatagaggaatggggcacagtaaaccttgaggcgttgaaagacaggattgcggcatggaaacatacacaggatcaaagtaacatgcaaaccagaaaagcagacatgaaattctatacttccatgttcaacatctgaaacacatagcacacaatgtgaactcccagtgattaaggtagtcctgcccctatgggctttcagttgtagtatatgtcctcttcccatagctggtttcatttgttgcaacttactttcttcagttttatgttcctgacatctctacctcttgggatttctcttagtgcttaggtatacaccttcagaccttcacaacattacacattgctctctcagggactgccaacacagatgttaaccctgctatacattgtctccaaggtcttctctgaaatctaggcagaagtctccatgtccctataactcttattgtacatgtctgtacaagcaacattacattgatagcaccaaggttttccttcaacccagacccctctaagacatggctgaagggagcactgaatggacatactgaaaggaaagcttcttaggcaatcatgtgctgttgagggacctttgtgagacctcagaaggatcaccccaatttagtaggacccaacaagtactagtggcatctagatttgtcctaatagagctttaaaaggagactcgtaaggactaaacaatccacaagttattaaacagactgccaaaaagtatcttgatattatctaaagtaattcaacaacaaattctgaacacagcagccaaaagtttatatttcaagtaatgaccttaaacttaaattttaaagatggaaaataggagctttaaacagaagaaaatcaattaaagttggcctagaaaggagtatcatggaattggaatggaaacattttgtaacagattttataaatatgccaaaagactcaaaggaaaacatgactgtagtaaagagcattgaatggtataaaatagaactaactgagatttttttcttttttggtaaaaataaaattgaaataaaatgcacttcagtgtgataggacattcgatgccgtagaaaagagtagtgactgtgaagatatagcagtagaagctatcctttctcaagcactctgtgaaaaaggagatatacataaagcctgcaaggacattaaagcctcagatctatggaatgtcacataacagtttatagcaccccaaaatggatgcagaagaaaacgtggaagaatacttgaacaattaataactccataatataagatcttaaccatgatcagtataaatgcactggaaatcacattaaatcaggttataccaaaagtgttgaaaagaaccaaaagaaaacatcatagtggtgtggaagcagaggtctacagtccaagctctgagcaggtggaggcaggtagagtagatagatcagtgagtgccagctaaggagagacatactcagtttcaaaaactgaggtgaacgggctttagagattgttaagcgaaactgctgctcttgcagaggacaataattttgtttccatcttccacatggtacacaactatatctaactttatctccaagatatccaacatcctcttctgacccctgaggacaccagacaaacagggtgatgcatatttgcttgtaaatgtttatacaatgaaaataaaatcttaaaagaaaaatggtgtggagcacaattgaggaagctatgtgataatcctgtggtgcatctcccacatgtgcgcaaacgtgaacacgtcacacaaacacagaggaactgaggagggggagaggcagaaaaatcaacattttaagaggtcatatggatagtgaatatatgacataattacatggagaaataattgtcaaaaacattttgtcagaaacaccacaaagtagaagaaattacaatggtgtcttcaatgtgttaaaagaagaagccaagctataattttatagaatttttctttgaagacaaaattactcatagatgtgtcctacaagaagtgttaaagcaactacggtgggaacaagaaaaatgacagcagatgaaatggaacattttgatttgtaataagaaatatttaatatatctcctctgaaaatttacttaagatacaatcaaaagttggcagcaacacacacacacacacacacacacacacacacacacacacagatacacagccaaagtatatgaagtttgttatgaattacataatgacaggagtataggtagatgaatactttatgtttttctagtacctataaattcacatgaataaattgttgattatatatggagtgtgagaaataattagtgcatactattaattcatttaaacataaacttttagagtaaaataaaaatagaacattgtattgttaacagattacctgacttagaaaatgttgtctttggttataaatggctagctatagacattcaaggcgattcatataatctctctgaacctaagtccttgcttagagtgttaggaaactgtttttaggagctcctaagcatactaagattttgacttttttccttttttaaaaatttttattggatatgttctttatttacatttcagatgttatctcctttcatggtttgcacctctggaaccccctaccccaccccctgtttctatgaaggtgttccaatacccactcacccattcctgcctccccaaacccaaattcccctacattggtgcatccagccttcacaggaccaaaggactctccttccattaatgcctgacaaggccatcctctgctacacatgtggctggagccatgggtccctccatgtatactgcttggctgatggtttagtccctgggagctcttgtgtgtgtgtgtgggggggttctgattggttgatattgttgttcttcctattggattgcaaacccgttcagctccttcagtcctttttctacttcctccattggggatcctgtgctcagtccagtggctggctgcaagcatccacctcttgtcatcagggaaatgtaaatcaaaacaaccctgatactccacctcacaccagtcagaatggctaagatgaaaaactcaggtgacagcagatgctggcaaggatgtagagaagtaggaacactcctccattgttggtgggattgcaagctgatacaaccactctggaaatcagtctggtgtttcctcagaaaattggacatagtatttcctgaggatccagctattcctgccatatacccaaaagattctccaacatataacaagaacacatgctccactatgttcataggagccttacttattatagccagaagctggaaagaactgagatgttcttcaacagaggaatggatacagatttttgggttttgaccttgagtaacaatgtttgaggaataattctactgcatggttatggatatttcagctcttcctttgaagacaaatgagaaagaactactgactactgtgtccagagctgaaattttgccttgttggtcattgagagcagaccacagtgctcatggtgcttctcattgagagagatactgtccttcacagctactttcccaagttggttcaaatgttatcccctttcacgtccccttccccagctacttcttcaaactgattcaagaattttttgtgtgctggttatttgaaaatggctctgtagataagacactcacatgttaaaattctgaatattggtttactaagtaggtattgactaacaagaggaaataggtattctgccaacagagtcaagaactaatttaaagactataagatgaaagcccagtttaactaaaattgagatcaatgtttgcttataggaaatacattgctgtgcagaaatggacaaagtaactttaaattgaatgaaataaaacctccacctaaaccaaaactcaaacattcttgtggctttttaaattttgtttcccctttgtttttgtatgtattatcacattttatctcatagacatttgattcagagtttaaagatagtgaattagtttactagggcattgagataacaaacaaagagaaaattcaactcagttttcaatatggaaattttattctgtagaatgaataatgaagggtagacaaaatatagaatatataacatatacattaagttaagtgtatataattgacacaaacttaatgtatttacaatgagtaaaagtgaaatttgcgcatgttctcactattccacaaaaggaaggagcctgtcatggaaaggaatgacacatacccacttccagccttgtttacctcttatggtttgaatgtttttgccattctggatgattctaatatttgataatttaagaaaatttaacttgtagtctcaaattagttgaactgctttctatgatacatacatgacatgtagatgaagccaaatgaatcaacaaataacaattatttgtaataatgaacaaataaggcgtctgcgtcctcccgcagccggcggtcgggaattgcaccagggacctgacaagggcactgcagagccatgcctttccttgacatacagaaaaagctgggcatcagcctggaccggcactttatgttcctaagcgcagaacagccctacaagaacgccgctcggtgccacgcgtttgaaaaagagtggatagagtgtgcacacgggatcggtgggacccgggcgaaaaaggagtgcaagatagagttcgatgacttcgaagagtgcttgcttcggtacaaaacgatgaggcgaatgcatgatatcaagaaacagcgggagaagctaatgaaagagggcaaatacacccctccacctcaccattcgggcagggaggagcccaggccctgagcggggcagctggaggccgctgtcatgctctgttttcccctggagagaatatttaaggaaagctccttcattaagtattaagtatgtggaaataaagaattactcagtcttaaaaaaaaaaaataatgaacaaatagaaaatctgtattagatgtgtagagaagagatacctaggttacaatgtgttaacatctattgaagagatagaaaggtaatgtagaactgtgtttactgtttgaatttcaagtgagaacaacatggggtttgtcccatgcttacctgtttgtccattgaaaaggaactaaagtggctagcctaaatataagaattataggttgagttttcagaatttagattacctttgactgtgaatttgactgtagagaaagaaaattgaaaaagtcaagggatttcttgagtgtagagattttttttaaataattgaatgtgaattaattaattacagttcctttctcattttgtttctgagacatggtttctctgtgtagctgtggctgccctggaactagctttgtagaccaggttggcctcaaacccagagatccacctgcttctgccttctttgctgaaggattaaagatgtgtgcactcaggttgaactacagtttttatttatggcattgaagtcccaaaatgttacagtgtcattggctggaattctgaataatttagtctttggaaatgtttgatttttatttttctaaatgttcccttaagaaattatagttgtatgtaaaagtgttagtatacttcaaacttatactaaagtgtcaagtaatataaattcatgagtgagtccttccttccttgcttcttttctcctttcttttcttttctttccttttctcttctcttctcttctcttctcttctcttctcttctcttctcttctcttctcttttcttttcttcttttttctctcgttctctctctctttttattacttttatttttaaacagttcagtcattacccccttcccagtccacccttccacagttccttttcccattcctcttccccgtgtctccaagaggatttccccctcctgctcccctcaccagacccccgcactcccagaagccttcaggcttttaagggttagagggttaggtgcttcttctctcactgaggccagaccaggcagtcctctgctgtgtatgtgttgggaccttggaccagctccggtatgctgactggttggcggctcaatgtctgtgagatctcaccggtccaggttttttgagactgctgatcttcctatggggtcaccctccttctcagcttcttccagcctttccccaattcatccccaggggtccctgacttcagtctaatggttggatgtaagtatctgcatctatctcagtcagctgcttgttgggcctcttggagagcagcagtgctaggcttttgtctgtaagcacaccatagcatcagtaatagtgtcaagccttggaacctccccttgggatagatcccaatttgggctggtcactggacctcctttccctcagtctcttctccatttttgtccctgcagttccttccgacaggaacaattctgggtcagagtttttgactatggactggcaacttcataaattaaatattttgttactttgtatggaacaatcagttgtaggaaaaaaaaactgataagagtcttaccaagggactagagagatggctcatcggttaagaacactgactcctcttctgaaggtcttgagttcaaatcccagcagccacatggtggttcacaaccatccgtcataacaaatctgactctctcttctagagtgtctgaagatggctacagtgttcttacatataataaataaataaatcttaaaaaagtgttaccaaattgattattttttaactaaaacaccaacacacacacatatgtgtgtgtatgtatgtgtgtgtgtatatatatatatatatatatatatatatcacatatatgtatatatgcaatactaaaagtataaatatatgatatataacatattatatagtatatattatataatataaaaaagaaagacatcctttctgttgtttcttttttttccagttgtttcttaaattcattgtactgtattagggtcctgtgtcattttgaagacgtttacttttgttgcctcccctgtctcactgactttcccttgtaccttagctctggtgccctctcctctgctttcatgtgtagtgtaccctgcagctgcccttcctctgctcctgtttttcacctttatgctcttccttaaaggtctgttcctgcactcatctcactgaaattcatacatacaaagttacaagctagccccacagctgagacagcatgagactacggtcctggtcagtctcagttccctagattactgtgagacttttcaggctgttcactctccctcagattgtattttctctgtagctgagttaaattcccttgtgtgtatgtaccacatttttattgcccattcatttgttgatggacacatagttttgttttattttcttgctgtagggcagaataagaatagacatgtctgtgtaaaaatcatccgtttattgttacttttttctttaaatgatactgaaccatgtgttcatatgtgcatattagctgacatatgctcacaacactaagcagacatagaacctatacatacattttgttgttgttgaaagtttcctatgctcatgtaccagctattctggatttatgagaagatatgtgtttataagatggcatgtggcagttttttattgcaggtgttagaaaacgtcaaagaaaaattgaataatctgtgaaatgcagagaaccagttataggtaatacctaatttcaaggaaacctaactccttagatatctttaaagataaatctcttttaaagagtaacatttgattaatgtaattttagttttggtttctgagatctgataaagattgcttaagtccttcatatacttatttaatcatatatttattaaattccacttgcacccaggatggcaacaatgtggagattttgaaataatggatgaaaatgtaattatttaacttactaatttcataagtatatgtacttaattttttattctttaaagtttcttttttattttcttctctttttattgaaaatagattctttttttcatacagtatatctggtttacagtttactctccctgtgctcctcatagttcctccccacctcctctccgatccagatccacttatgagagactttctgtctctcgtaagaaaacaaacaggcttttagtggataataataaaacaaaacaaaaacaaacacatccaagttgaacaagacaaacagaaggaaaagagcccaagcagagaccaactcatttgcatactcaggaaacccataaaaacactaaactggaagccattgcacacacacacacacacacacacacacacacacacacacacacacacacacacacacacaggacctgttgcagacccatcctggctctgtgaatgctgctctagtgtctgtgagttcatatgagcttggatcatgtgaatgcagagggccttgttttcttggtgtcccctttcccctctggctcttacgctcttttctgccttgtcttccatgcagttgcctatgctctgaagagaggatttgatagagatggctcatttatggcagagtgttccaaggtctctcactctgcataattggtttgaaattcatcactaaaatgtcacaagacacagtcccatttgctgacagtagagggttattttaagtacttgtttctttaggttatatttatgatctccattttgcaaccatacaatttcttgttgttttactgtaacctttgaaagacttgcttacctttgcatctaaccctcggaactgaagaaaattgtcagaaaagaaagcttaatgtgtatctccagtttcaacttcttgcagaataatctctaatactgttaaagactaatgttgctaaatgtcatttcaaactgatacatttttacttgatttttattgggactgtgtgttcgatagtgttaggcctcttttctgtaaaatagtttgcagtagtttgctgtctattttgatatgatctatgtttatttaatatctgctattgtttagaatttaaaagtagaaaaccaacaattatatactcagtattttcagtcaatatgtgatagagaagagataggccactagacattgcaatattcaacaataattgttgtcaaagccatcaggcctatattcttcacagctagcaggctcatgtaaccagagatttctccaaatgtagccctaaaatatagtaattacctaaaacattatgaaatcattgaaatttgtttggtaacttgattgtgtgttctctttgttgttgataagattatgctataatatctaaatgttcaaaatccccatatggttatgcttaagaaaatatgtcacctttagggttagccagaggaagaaatgttacagagattactggaaagcataatggtgtttacaaagccatagctgaatgtattctcagatgattggttaaggccagtgtgagcctcatgtcagttcactatgatgggtgaacatatgtgctttagacctgtgaaagatgaagatgtagtagtggtatgctagaacacacatggattagtgtaaatcctttgtaagattgaagtctttcataaatacccttttgtacatcatcaaaaaaaatcactgttttaagacaaatgttaaagaaatgctcattttaaatgtaaataaaaattcaaaaatagtcacatctttataaacaaggacaaattattagtttcttttcccatttctgtgaagaacgacagatggatgacctttcgaagtagtccttacataaactttgtgagaattgcaattgtgaatttgattcattttgtgaagcttatggttgctttgaaatgtacacagtaataatcacctcaacatttgttttaattccgccaagattatttatcttacctgaagtgacagacacctctgttgggatattattatgaatatcgttataatttatcaatataaattatatgaacccaagattctgactttagtgagaattttaacccattataaataggcaaatattaaaatttcaaaacaggatcttgcaaaggcttttgtaggaccttttccatttaggataaaccatatcaagatgcaaaggtaattggatgcccctctgtatgtttctgtgtatatatagtacataaatacacatgcatatgaatatgcatgaacatatatatacacctttgtgtgtgttactccaagagaagccagaattgttagtttatatagaaggtagtatcaactcattgtgattagtagttttgttttttgccacatcaagatcatagcatctgtgggatcaaggaattgtcacaatttcagctcacagtgcaaataacaaaccttaacattcagttccagcctgcataaagtgagttggctagaaagaagcatactcagcatttaaactattgagactgatctttgtgttgagtaaattttaacaacatttggaaaaagcttccgattatttctgttctatatatttccttcaaatttttggagaaattgaccacacccaaactcaaactttaatgattataggaatattatactctgtgctttttgagaacattttaaaagttagtcttaccttatgaatagagaaagaaaattcagtagaaccagagaaaggagcttccctgcacacgggtccatcctagaagcctttaagagacccatagcaggggcagactatccagtgtcagaaaatagaacatctttcatatgccattcatggcttgaagtatataaatgtaaccctagaaatattcaactgaaaagttgatattgcagaaagaaccttggttacataaatgtaaatttcatttttcttaattctaccttcagatttctttaggctttttattttattttttttagtatgtttcaagatttgacaaataatgatgtgtaggatgatgatggggaaaggaggctgttggtatggaagagtgcaggagtgcctgcggatcgaggagaagagggaaagagaaacagcaaaacaaactcaatgaaaaattccctgggggaaaactaatactttgtctgaataaaaagcaaagtgagttgtaggatgcccacagtgtgcatggctattaccaggtagagatttatgtaagcatttgcagtctaaagtaccacctatatacttgaattttctgtaatatagtgaatatttgagaagaaaacattcagaaattatgccttctgtgttacactgcttgcttgttcagattggttctgcaaagatccttttcagaaagaagccagggagcttcttgctgtaggactgggctgtgtatctcagctctgctacccaagagatctattgatttgatcatggctgatgctttcctaatgtttcacagtgaagtattggaataggcattttttttactcacataggaagggggttgttcattgtgtaactgaattgtcttgattgccaaggcagtttgctttgtagtaaagatctgtattacatcacctgtcctgacacttgtgggctctgtcctttataacagtgtctccctaattagtgcctgtggtctcgtcaactctggatcttgacctttgtagttttacacaagaaaagacaataaagtaactttttttatcctgtcagtattaaagtatgagaaattttattttcacaagctttcagtgttgaaattcacacacaaaaaagatttatcttatgtagcaatgagctaacagcacataatatatatcttgttttttttgttatatactaattcacaaaatccatcaataggaaaattaatttatttaaatataaaaatattagtggaatctttaaacatcaaagtattatcagtctaagtagtgcacactattgtggagcaataaatgcacatttagtgctgtcctggaagaagtgagtgagcaggggtgagggtttcatgtacgtttgggaagtgcaaacaggacaccgcccagtgatgaagaccagaaatcctatcctactttgttctgactgtgttgtttttcctcaaaccttgtcaaataatcaaaggaagctatcgaagctcttctggtcatcttttaatgctttctggtagaaatagatgacttttgttgccaaaggtgaaagatcaaatctacaaaggctttctttagagttgttctctttagcaccaagtaatgcttaggaatgctttgagactaggaaaccaggctctgttaccacagataagcttagagaggaagcaaaagaaactattggggcagtcttttattgtaccttcctaggtatctgatgtatgtgtgagtcacaattgcattttcagatgcttcgtttgctcttggcatttgtgctgtgactgtccaaggtaggagtgcttgatgacttttgttaacgcttgttactaaagtcccaaatccacagtagatccttgtgttgaactgtaatgttggcagggaagtttgataatgttatagaaaactatccatgataagaacaaggggatgaatggtcatatactacttaaaatgactttattgaaagttagttcataaacaaaatctgcaagtatgaatgagagataaaacaatgtttttatataaagcttacaatgagtataaattattttcttttaatttcagtgtgtgtgtgtgtgtgtgtgtgtgtatgtgtatctatatgccttaacttctagtatgatcatcatgatttagttgaagatagcatattttgtttagaatgtgaaattcttgtgcaaagggtttattgatttgtttttaattttgatatatttattcattttggtgtaagaaactggcattataccatgaatcccattttaaaacttttttttagtgtgaaaatgaagaaagattttggttctcatggctttacagcatggaaccttagtaaaaggtgtgggtgtggcatagttattggctcactgtctgccacatattgcaggtaagtctttgatgatacagtgttccataggtctagtcagtgtttagacaactggaaatgtgtgacagagcctctttaatttacaactgatttaaaaatacctttaattataaatcacgatgttttgactaaatgacagtgcgctggggaaactgtcagacaggcctggccaccgctgcgccctttagtgttggcagtccacatgcttgttaactttcagatgatgctgcagatgctgctagtttgaatcaaagaagtctgaaagaaagagagcaaagcaaatgataacggtctaagttaggatttaggaaaggattgtaaaaatcatacagaaaacccctattgttttttccccttatgtttggaaagtgaagttgagtattacactcatatgtttttctcttagattttcttttcctgttacacacttctaccctagtaatgtttttttgagaatctttaagaaccttgaatttaattgaattatgttttagtttcttgccactaggatttccttggagaagtataagatcagtctacaaagcaacagtaacaatagataaatttctgtgcaaaaattagctttaaacttacaaatttatgtaacttaacttattacttgttcaattaaaatgtaaagaattatatagttttactgatcataaaaatgatatgtatttattatagaaaattcagcccatgattaaaaataaagaaatagaatataaagtcacctatcttctccagtgttttatgtatatgatataaaatacgtattatgtatgtgtattacactcacacatagataagaccagtccatcgttggcctgaggtggaaattagtaagaatattgaccaactaacttaatgcaagacatctaaatgatcttacaggaaattgcatattgggtcccacaaagcctttagttgtcttgtttttggcatgagaaggcttcattcaggtatccatctgtgagagaaagtcaggggaaagttcctgcatataccgacattaacatgttaacatattttacctttgggaaatgttagtgtactgtttatattgagttttcctttgtccatagcagattgtatcgtgacagggtcgaaagtatttgagacattcaggtatacgtataagaaacttctgtcgtcagttcttctctcatcaagtgtttttgtataattaatgcctatagtgcttttcaagagattaaaaattattatagaatgctacaatgctatactgttttaaaattattcttatttaaatataatacaaatgcttgtgtgtgtatatgtgtttgtgtacctgcatatgagcacatgtgtacatagcaggcagagacattggctcccctggatttggagttgcaggcggttgtgggctgtcctgtgtgcatcctgggaactgggctggcatcctttggaagggcagtcagtggcctttactgctgagccatttctccagcccctttctgagagttttaccctttttttcagtgtcttgtttgtgagctattatttctgtcttgacaaaatcatcaacaagacagccaaaagcaattacgtactgaattttatgtataaaggtggggaaagaaagtacaaataagtctttcttgtgtagcaaaaaattaaaaataaatacattttccaagaaaagagatgttttgattttgaaaacctaaaaaagatcattattgctatattgggaatgaagggaggcactaacaagtgaaggcattttattgtccaaggttgggtccaaaaggatttattttgttttgaattatgcatctaatgtggcttttgtataggtatatgcgtgtgagtgagggcataaaggcctgaagggactgtgggatctcctgcagctggagctgtaggcagttgtgagccacgcagtgttggggctgggaactagacctgggtcctcttcaagaacagtatatgccttaacccctgaaccatcgctctggcctcaagtgcctaactttgttttgacttacaaagtatgaaggcttaggggaaatattgctactttctccataaggaatttagagttatttggattcttttgatcttataaaccagttttgcatttcttattaatcaccttgtcagcaagtcataaaaacaagcatagggaatatgcagagttattccaggtaagtaaatattggttgtcctttttcttttcttttttcttttaatttttctttttctttgtgttttttggctttttttgagacagggtttctctgtatagcactggctgtcctgaactcactctgtagaccaggctggcctcaacctcagaaatctgcccgcctctacttcccaagatctgggattaaaggcatgcaccaccactgcctggccgttaatttacttgtatgaaaaaattattaaaaataattttgaggaaggtatgtttgatgaatatgtaattccatgtatagtatgtttcttgcctccttcattttacctagaatagcattagaatcatttgagtctgtttatccttgtcttaacattggactgttctcaggagttttttcagttgttaagcaggacatgaaccaagcgctgttttaaaaaatgatttataattaaatagttaatttatgggcttatctgtgtatatagatgtgtgtgcacgtatgtgtacatgcatatgtgtgtaggtgcctgtgggtgtgcacagagggcatcagggcccatggagcttgagttccaggtgtttgtgagccacctgatgaggtcttaggtcccctgggaaagcagaatggactctaaactcctgatccatccctccagccataagggctgggtttttaatctgagattaattatttggtttgagtactttcattaagaatcctgccatataacaaaaggcaactcatgtaatttatattagtttcagttttgttcttggtaaaatgaagatggtaacctatattcattttatggtgggatctgtgaggattattatatagttataggtttaggtgccttcaacataaatgtaaataaacattgatgtatgtatgtctttgtcatgtgctgatttttcttggagacctcaggagtagaatggctgagtcatatacaagacctgttttgacgtttttgagaaatgtagttactgatttccatattagctagtgtacatgctcactataattatataaggattcctttggctacatcctcaccagtgtttgttgctattttcttaatggttaccatatttactatggtcacatgaaatctcaaagtggatttaattttaatctctgatggccactgagattgaacatttttaaatgtttatagactaacttcaacatttgaggaatgttcttcatcttgttagcttttgttaaagattgaggttttttgtttagtcgttttaaatatttatatattcttgatattaattctgtccatttaattttaattaaaaattaagttatagatattttgacaaatgggtagtttttgaaataattaaggctaagtaattaacatacttatacctcacatactttttatttgtgtgtgtatatgttgggatgacatttgataccttattttaggcatttttaagttgactttagtctttattacagctgtaagacagataactggcttgttcttgttcaaccaaaattcacactgtttcaccaacatgtgcacatttcccatagtcaccgttcaaaatgaactttgaaaagctgtgcctgttacatagcatcttgttaaatttagaaaataagctattttaaacattttattaataaaaattataaaataatgggatgctaactatgatgtgagatacaatcagaaatactttcatagcccatattaaatatttcacttctgtgcctcataatttaaacctgctcttcagcatggcctagctcaatctctcctgtttatataataaggttcttgtgcttgctcactgatatttcggggtgaaataccttctatgactaggattgatattaagaagttaatgtttagtttacctcatctatctagtagtctgaactcattatcctagtctatttcttaaaaattcgcagtgaatctagttttaagctttcacatatttgaaaaaataaatttccatttttcacccaatcccgtatttagtcaacttgtaatccgcttggtttctttgccatctcttgtgtgttgtaatcctggtcttgctttaggcagggtcttatttccctttcttagaaaagtatgtagtaattctgggtcattccgtatcaccatattgatcatgtcatctgtagctgcagatctgagtggaactcatctcctccatctagataactgttattctgagtgtgtagtcaagatcagtttgcctgttcaattccttatcatgcagttgactcaaactgacctctgaagatgttgcctagttcagtcccaggataacgtaacagatcattgagatgctgtctagtaattgtgtcagaagagtggcttgtgatgtctagtaaggaagagaggaacattttaaattggaaggttgaaagattgttgaataatatataaacaatacatttgctaaaagatgatgaaaatatagtcaaatgttttaagcattatgatactgcctttcataatgtagacatattattcaattgttgtatacactttggaactacaatgtaatgtaaatttaaatatactagttgagtgtttcatatatgtcttgattatattcatatctcccctagctgttcccagatccaccctgcttccctatcaacacaattttttgtcctttattttatttttgaagtcccatcaagaccaatttctacttctcaaatattcttgaatgtgtcaggttctactggaatgtggcagacttgttggggactatactcttagaaaaaacaccctcttcttctcccagtagctgtttcaatagcttcttggccaggagtgagctttctgagtacagcgcctatctctaatctggaatttggcctcgcttgggtttgtacaggttttgtgcacttaaattttaatattttatttgaatttagcacaatgatacagcttagtaaaatagatttttaaaatatatattctttctatatatattataaaacatacatacatatgtgtaacatatatgttaaattcaaaacatacttttggacttaaatcataataataaaaaggaagtatggtttatattgcaaataatatattaaagaaaattttactggagtgtctagtcctttgaacaattaatatatgttgctttcatttctaactcttgaatatttagcagtcaaccaaataaataaatgcaataatatttgaggattacagtgtttttatttatttatataccatttactctataaaaatgtatatggccaaatatgttgccatcctgttgtataatactttttcattcattaatttacattttcaagtcattatttacacaaggtataagttttcttattgaaagatgttaattggtttgctggcaccttcagaataaagggtatttagtattttctttgttcttgctaggtaataagttaaaccatataagcatttatgtaggctttccttgtagttccttgaccctcttacacttataactacaaattggcttgagattcaaaatttaaccctgaaattctctctatttagacacatagaactatgtttggtaatttgtggctgtgtagcacacaaataatgttagcatctgtgtaaacttaatttttaaaatagttttgtatatattgcacaaccaatttcatcatttaattacatgtttgcctttttttactatatataaagatagaattctgtatattaaaaccatacattatatattacaaagtagatacatttatttaaaataatgctaaaaacaaaatttaaatgaataatcatatctgtttggtcctgtgcttttgtttttaattttcacttatcattatctattgattattcagtctgcaccccaggttgattcatccaatttgttcaacttttgtgcaaagcccttagctgtctactgctccataaggtgcctaagatcactttagcctcacctgttcttgtaaatctactttacacagtactgaaagacttactacctgggtctgttgcttgactgtggagttaggtgcgatccaaccatcactttgctacctccttggtgcttagggttttgttcattgttcttaatctcatatttgtttctaaacaagattggtaggtgaaatgttggtgatatttttatgaagttgctccttttcagtaagaactcagtaaataataattacagcttgctttattgttaattatatttcagtgcttcattttgcatctgcctcttgatggtttctttgatcttagccctagttgtttgtgtacctctgctgatggagctgggtgggcctcagtctggaatgcttcctgtattccttgaagactcttaatattcttggtgtctatttatggtggttttatagaggtgtaaggtcttgctgagaatttttctttctgtgtctggaaatagttaagaacatatttcttgaaattcagttattaccatggtgagtctacatagtaaaacaattttggattgcggacagatggaaattcataatgctttcctaccatttttcttttttaatcataaaacaatttcacataagaaaatttgccatgctaatcatttaaatttttttcttatttaaactattataaggaacattagaattatttataattaaaaattataaaataaattattaatataaaataaataatgataaattattatgttattattgacttaaaaatgaaacattttagtgcatcactcatcgatagctcttttataggctgtaaagagcataagtatcatcttgagaattaatttagttgaataaaactgaaagtctttgttaaatcaaaactgtttttctctttacccctttaccaccattctactctgtgtctctttgaatttttaacaattctaaatgttatatataaatggtaccttaaaatatatgtgtttggtttattttattttattacattaagataactaggtgtttaaattgacaataaacttcaatagaaatttctcaatggataaaaacacttaaaagtatatgcaacaccttagttatttgttagtgtacttaaaccttaaagtaagatgcgatctcatacctattataatgcctgctgccaaaacaaactgccataaaaatagtctgggacttgggtgtagcaaaacaggaaaaatggtaaacctgttatcataactaagctggcataggatataaaaaaagaaacacaacagctcctcaaaatttatccttcttgagttctttatatatattggatattagtcccctatcggatttaggataggtaaagatcctttcccaatctgttggtggtctttttgtcttgttgacggtgtcttttgccttgcagaagctttgcaactttatgaggtcccatttatcgattctcgatcttccagcacaagccattgctgttctattcaggaacttttcccctgtacccatatcttcgaggcttaggatttatatggattgcattaaatatttttactctttgggaaatattgtcatattcacaatattaaagctatttatgcaatatgactccatgagccttgagatctccactgatcaattagtacctccttcagtttcttcctgtaaggttttagttgttattctgcagatcttttattttctggggatagcgtaagtagtatattattttcgaaattttaaaatgaaataaattctctcaatgtctcctgtaggttatttattagaaatatatatttaaatacaggtaattttatacatatcatgctattttgatgtatttaatgtttaaattttgttcagtctcagaatttctgtacacatatttatatcagatcaattaatgtaattaaaagagacaagtgttctttcctgaatgaaaagactccagtttttgtttaccattcccagtactattgaatagaaatggtgactgtgtgtttccttccttaagtcctggtggtagggaaaagattttgttatcttggaggctgatcttagctatgggtcctttatatagcattatgatgctataatatatttatatctctgacatgttgataatttttgtttacatttttgtttggatgttgctagtttttttctgcctcaattgagatggtttcccaggctttccccacttgctgtagtgctctgatgagttttcatgtgacaatttttcccctcaaaaactacggatttctttggcggcaatcattgcagtaatgtgctgagttcactttcctgttggctaagtacttctagtcccttggtgctcagaggggtgtctgtctgcacttacattttatgattttgctgtcatgatagaactagacttacggaaatgtctgggaataagctcttctcctaattgttatattttggggtggtggaatctgagaaggaagctgatatttctttagaagcctgatgaaattcttcagtggagccatcaggagtaggccctttctttttggggagtttttctattaacttgtttttcttactgagttctatatttccttattttttgttttgttaggaatttttccctttcatctgaattatcaaaactgttagcataaagttgcatatggtatgaacttaatgttcatttctatagaactgattcctcatgctacttttcctttttttttttnnnnnnnnnnnnnnnnnnnnnnnnnnnnnnnnnnnnnnnnnnnnnnnnnnnnnnnnnnnnnnnnnnnnnnnnnnnnnnnnnnnnnnnnnnnnnnnnnnnnnnnnnnnnnnnnnnnnnnnnnnnnnnnnnnnnnnnnnnnnnnnnnnnnnnnnnnnnnnnnnnnnnnnnnnnnnnnnnnnnnnnnnnnnnnnnnnnnnnnnnnnnnnnnnnnnnnnnnnnnnnnnnnnnnnnnnnnnnnnnnnnnnnnnnnnnnnnnnnnnnnnnnnnnnnnnnnnnnnnnnnnnnnnnnnnnnnnnnnnnnnnnnnnnnnnnnnnnnnnnnnnnnnnnnnnnnnnnnnnnnnnnnnnnnnnnnnnnnnnnnnnnnnnnnnnnnnnnnnnnnnnnnnnnnnnnnnnnnnnnnnnnnnnnnnnnnnnnnnnnnnnnnnnnnnnnnnnnnnnnnnnnnnnnnnnnnnnnnnnnnnnnnnnnnnnnnnnnnnnnnnnnnnnnnnnnnnnnnnnnnnnnnnnnnnnnnnnnnnnnnnnnnnnnnnnnnnnnnnnnnnnnnnncattggaaatgtaaatgaagaaaatacctaattaaaaaaaaaaaaagaaggaaggccaagtacgaatgcttcagtccttcatagaaggggatcaaaatactcacaggagaaaatacagagacaaagtgtggaacagagatggaaggaaagaaaaaaaaaggttaaactacaaaattaataaaaattacttaaagcctcttttgtcttttagtatattctctttaagaatttaataaaaattcttaaagcccctattacgttttttaggttagtattggggataaattttctttctttaattttcacgttctgaaagtaagttactaatttagtttctttaagaatttttctttttatttaaatattataggcataaaattccccttagcactgtctttgtttacatcatccattttaatataggataacatgttttccacttgcttcaaagtttcccttaactcccttgtgatgtttgttttgatccattggttatttaagtgtgtctttatattcaattttcatagttttgtgaatttctaatttgcctttgttaatgatttctaacttacaccatttcagcattgcaagatatcttgtttgatatgtatattttgaaaatttatgggaacttcattttgacctaatatattttataaagtaccatatgttcacttgcagatagcacatattttgttaggaagtgcaatctatttatctatctatgtatccatccatccatctttactaacacttttatcatttttatattatcattaatatagcccataccacacaaatccttatttcctttttaaacgtaaagatttattattcggtaagattatgcatatgttttctagttggggtgggtatgtgtttgtgagtgcagatgcttgggggccagaaaatggtggtgtatcctgtggtcttggagttccaagcttttatgaaagccccactgagggatctgggatctgaactccagtactctctaagtaaaagctcttagtgagccatatggcacagccttgaaaatgtttatttctactttttggagatatcagcaatatcctttgcagtttgttgtctttatgatgactgtgtagcattcatgcttcattcctctccccatatctcttgtgtatccatcttcttttttccttaaaacccagacttcacaatatagatttaaagtgtcaataaagtgccaatatttgtgatagccagaggtgtcactcattcacctttatttgctcatgggcaagactttttttctggaaggagctcaatctaggccatattacaaaaattcagatggtattattttgtctttttttttcacatcaaattgctgtaaaacatagttttgggagattagcatcatcaaatagacccaagaagtcatggtacttaccagtggttaatttaatccatttaaacaatttgaattttcccacatcttttgaaagtgctaaggaggacaattttgtcatgataatatgacactaacttatcctttgataagggtgttaagagcaggtcattagatggactaagggttggatggcatgctctgatttttgttgactagtgacctctaaaacttattacatttgtgtccacttaatatcaagtcacctaatggaagcacattttttttccaccaaatcattactaattcagtacaattttacccatttaatatcaattgacactaagcgatttcctgtgcaatgtcaattgaaaatcactgatttcctgctaatacagcacttagtgtcaatttctttgtgcaggaaaagcattttttcaattagctacaccatataattttttgtttttagttgtttgcatggatgtctgataatagtttttaacacaaagacattggagaaaaaagatgatttttctctttggaattaaataatttaaaccccaggattttattcttcatctataggagatcaagatattttgaccaataaaaatgctttcgtgccttaactatgtcagaagatgtacaattttagtattaattaaaaattacctttggtagagaatgagctttaataattcttacatggtctcacaagaaaaatggtacaccattatcttccctatttaatggaaattggaaaatttcatagacagactatccctactaatagaactataggaggatacaggtcttaaagactgattgcttaccagaccttcagctagggtaatagcagacacatatctcttgaccatctctgtcctaaggatttatgacaaatgaatttaaaaccagaccaaattcaagaataaaggtagtgttttatatgtagaatgtttataagcacactcagctgttataatattgacatacattgtaaagtagtggctagacaaagaaatgacatcagtgtataaagtgatcctcttctggtgagagagatctgtgcatgagccacagttaagtaactcttaagtgataaactgatagtaagtggtgttttccttttgattagtgaaacaataatgatataattgggatcgttattgagttgggctctggaggaagcttctggtgtatctttgagagaaggaaagatggattctaatgtggtttctgtctcttttccttacctttctgttttcttacagaagatgcacattcttaaactgcttgactctgtgtaaatattattcccatttcagaaatgtcttaagaagaggatttagaaataatttgagctagtatttttaaatatacactatttgacagatattgaaccagaatttggatatacaaagtgaaataaagtacccattttcttgagaaactaattatacatctatatctgcccctacatctatttatacatctatctataatgttgtcaatatatagtatatttgaatgtgtgtaatagttgcctattattctaggcgaaataagggcacattttctatcctggtaatttaggagaaacttttttttagtacttcatatccaccatttcttgccatccctatgtctcttccaactcctcggtgtgcctccactccctctcaatttattgacctgttttaattattattgttttacacacacacacacacacacacacacacacacacacaccatgctgagtctttagtgatgctcatatgacctcttgggattggatgacctattggaggctggtccctggaaaaaagcgaacccacattctccatagccattaatactgcccatctcgtggttggccttatgagatttatgctgtccacatttgtacctcaagtggtggtgttattatgcaaatgcttctgtgttctcatttttaaggtttcatggtgcaccttccctgttgtagacagaaatcactatctcacagcagacatcctggtcttctgcctcttacaatctttctaccccctatcctagatgttcccgaatccttggttgtagggggttgcattggaggtatatcatttgggttgggagaatgcaccatttgttcttgatattctgatcaattgtggttttctttagtacttctgctgcaaaatgaagcttctttggtgacatgtttgaactacactttcttgtatgtaaggcaagtgcttagggtctttgtttaggaaggcagcaatacgggtcttctaggatccatgacctcaccagacctgggtagctggttaagtttctaggattaggtatgaattccttcctgttgggtaggccaacggtgcagttagacagctgttgctcactcaagagatgcgagttccatttctacagtctttgtgtatttttctaggctggtcattgtgcttcaaacttcttgatgcataaagggatttttaaaatgacccttgaaagatgaacagaaggcaaataggtaaatgtaggagggcacattgttggaagataattaataattaataacagctaagagatagttatctcttactgatatattaagaagctttttgaatcaacttgttattatagtgtatttgctatttcctgtcatttttgaaatttaagagtcgatactgatattacccccaagtccttaggtttttttttttcatattacattttattatttctacgtagtgttcagtcatttgttgtaaatagaatttctaaatcttatgcttgccagtgtattttttaggtatatatatatatatatatatatatatatatatatatatatatatatatatatatatagagagagagagagagagagagaaagagaaagagagagcgagagagcatgcttttcatctttatgttttcagatacattttttaaaataacgaattgcatttgcacttacagctcctgccgtgttcatatgattagaaagaccttctctaactcaagactaaaaactctcctatatttacttctaggattttttttttatggattcattgtttacatataactccttaaaccatctggatttttattttgatatacagtgttagatagactctaaatttactctgttctaaatatttaaccagttgtcccagcaccatcaatcgaaaaatctatgttttccccactgatttgaaatgcattatttatcatatgctaaatacttaatttacaaatgttttttttcctagcttttctatttagtttccaggctttctctttttttcttttcatttgttttttgccagtttgtgtattcttttgttagactttactatttatttattgtgtctcttaccatataaaaagttggtaaatataatttctttttactacatttttagttaaaatgttattggcctattcttattcacatattatttttaatcaataatttagtcacctctgctctgactccagtttcagttggctttttgcaaaggctttattgtatttgtgaattaatttataaaaaattaagatatattaccaactgataaatacattggtattttaaccattactcagaaaaggtctaatacttctttaagtgttcctctctttttcaaggttattttttatgccatggtattcgcaatacttgcattttgtttaatggtgttgctggcccttctggatgatggtttttggtgggtgcccaaatggccattctctttgccccactgagatatcctctagtgcttctactgtttactgttgttagtcatctctgttgggggatactctaagttataatgaaatgatttattcttatcattttaatataattttcaatctagaaaagtaatgttttacttgtaattttagtgacaatcttttcttttttttttccattttttattaggtatttaactcatttacatttccaatgctataccaaaagtcccccatatccacccacccccactcccctgcccacccactccccctttttggccctggaattcccctgtactggggcatataaagtttgcaagtccaatgggcctctctttccatgtgatggccgactaggccatcttttgatatatatgcagctagagtcaagagctccggggtactggttacgctcataatgttgttccacctatagggttgcagatccctttagctccttggctactttctctagctcctccattgnnnnnnnnnnnnnnnnnnnnnnnnnnnnnnnnnnnnnnnnnnnnnnnnnnnnnnnnnnnnnnnnnnnnnnnnnnnnnnnnnnnnnnnnnnnnnnnnnnnnnnnnnnnnnnnnnnnnnnnnnnnnnnnnnnnnnnnnnnnnnnnnnnnnnnnnnnnnnnnnnnnnnnnnnnnnnnnnnnnnnnnnnnnnnnnnnnnnnnnnnnnnnnnnnnnnnnnnnnnnnnnnnnnnnnnnnnnnnnnnnnnnnnnnnnnnnnnnnnnnnnnnnnnnnnnnnnnnnnnnnnnnnnnnnnnnnnnnnnnnnnnnnnnnnnnnnnnnnnnnnnnnnnnnnnnnnnnnnnnnnnnnnnnnnnnnnnnnnnnnnnnnnnnnnnnnnnnnnnnnnnnnnnnnnnnnnnnnnnnnnnnnnnnnnnnnnnnnnnnnnnnnnnnnnnnnnnnnnnnnnnnnnnnnnnnnnnnnnnnnnnnnnnnnnnnnnnnnnnnnnnnnnnnnnnnnnnnnnnnnnnnnnnnnnnnnnnnnnnnnnnnnnnnnnnnnnnnnnnnnnnnnnnnnnnnnnnnnnnnnnnnnnnnnnnnnnnnnnnnnnnnnnnnnnnnnnnnnnnnnnnnnnnnnnnnnnnnnnnnnnnnnnnnnnnnnnnnnnnnnnnnnnnnnnnnnnnnnnnnnnnnnnnnnnnnnnnnnnnnnnnnnnnnnnnnnnnnnnnnnnnnnnnnnnnnnnnnnnnnnnnnnnnnnnnnnnnnnnnnnnnnnnnnnnnnnnnnnnnnnnnnnnnnnnnnnnnnnnnnnnnnnnnnnnnnnnnnnnnnnnnnnnnnnnnnnnnnnnnnnnnnnnnnnnnnnnnnnnnnnnnnnnnnnnnnnnnnnnnnnnnnnnnnnnnnnnnnnnnnnnnnnnnnnnnnnnnnnnnnnnnnnnnnnnnnnnnnnnnnnnnnnnnnnnnnnnnnnnnnnnnnnnnnnnnnnnnnnnnnnnnnnnnnnnnnnnnnnnnnnnnnnnnnnnnnnnnnnnnnnnnnnnnnnnnnnnnnnnnnnnnnnnnnnnnnnnnnnnnnnnnnnnnnnnnnnnnnnnnnnnnnnnnnnnnnnnnnnnnnnnnnnnnnnnnnnnnnnnnnnnnnnnnnnnnnnnnnnnnnnnnnnnnnnnnnnnnnnnnnnnnnnnnnnnnnnnnnnnnnnnnnnnnnnnnnnnnnnnnnnnnnnnnnnnnnnnnnnnnnnnnnnnnnnnnnnnnnnnnnnnnnnnnnnnnnnnnnnnnnnnnnnnnnnnnnnnnnnnnnnnnnnnnnnnnnnnnnnnnnnnnnnnnnnnnnnnnnnnnnnnnnnnnnnnnnnnnnnnnnnnnnnnnnnnnnnnnnnnnnnnnnnnnnnnnnnnnnnnnnnnnnnnnnnnnnnnnnnnnnnnnnnnnnnnnnnnnnnnnnnnnnnnnnnnnnnnnnnnnnnnnnnnnnnnnnnnnnnnnnnnnnnnnnnnnnnnnnnnnnnnnnnnnnnnnnnnnnnnnnnnnnnnnnnnnnnnnnnnnnnnnnnnnnnnnnnnnnnnnnnnnnnnnnnnnnnnnnnnnnnnnnnnnnnnnnnnnnnnnnnnnnnnnnnnnnnnnnnnnnnnnnnnnnnnnnnnnnnnnnnnnnnnnnnnnnnnnnnnnnnnnnnnnnnnnnnnnnnnnnnnnnnnnnnnnnnnnnnnnnnnnnnnnnnnnnnnnnnnnnnnnnnnnnnnnnnnnnnnnnnnnnnnnnnnnnnnnnnnnnnnnnnnnnnnnnnnnnnnnnnnnnnnnnnnnnnnnnnnnnnnnnnnnnnnnnnnnnnnnnnnnnnnnnnnnnnnnnnnnnnnnnnnnnnnnnnnnnnnnnnnnnnnnnnnnnnnnnnnnnnnnnnnnnnnnnnnnnnnnnnnnnnnnnnnnnnnnnnnnnnnnnnnnnnnnnnnnnnnnnnnnnnnnnnnnnnnnnnnnnnnnnnnnnnnnnnnnnnnnnnnnnnnnnnnnnnnnnnnnnnnnnnnnnnnnnnnnnnnnnnnnnnnnnnnnnnnnnnnnnnnnnnnnnnnnnnnnnnnnnnnnnnnnnnnnnnnnnnnnnnnnnnnnnnnnnnnnnnnnnnnnnnnnnnnnnnnnnnnnnnnnnnnnnnnnnnnnnnnnnnnnnnnnnnnnnnnnnnnnnnnnnnnnnnnnnnnnnnnnnnnnnnnnnnnnnnnnnnnnnnnnnnnnnnnnnnnnnnnnnnnnnnnnnnnnnnnnnnnnnnnnnnnnnnnnnnnnnnnnnnnnnnnnnnnnnnnnnnnnnnnnnnnnnnnnnnnnnnnnnnnnnnnnnnnnnnnnnnnnnnnnnnnnnnnnnnnnnnnnnnnnnnnnnnnnnnnnnnnnnnnnnnnnnnnnnnnnnnnnnnnnnnnnnnnnnnnnnnnnnnnnnnnnnnnnnnnnnnnnnnnnnnnnnnnnnnnnnnnnnnnnnnnnnnnnnnnnnnnnnnnnnnnnnnnnnnnnnnnnnnnnnnnnnnnnnnnnnnnnnnnnnnnnnnnnnnnnnnnnnnnnnnnnnnnnnnnnnnnnnnnnnnnnnnnnnnnnnnnnnnnnnnnnnnnnnnnnnnnnnnnnnnnnnnnnnnnnnnnnnnnnnnnnnnnnnnnnnnnnnnnnnnnnnnnnnnnnnnnnnnnnnnnnnnnnnnnnnnnnnnnnnnnnnnnnnnnnnnnnnnnnnnnnnnnnnnnnnnnnnnnnnnnnnnnnnnnnnnnnnnnnnnnnnnnnnnnnnnnnnnnnnnnnnnnnnnnnnnnnnnnnnnnnnnnnnnnnnnnnnnnnnnnnnnnnnnnnnnnnnnnnnnnnnnnnnnnnnnnnnnnnnnnnnnnnnnnnnnnnnnnnnnnnnnnnnnnnnnnnnnnnnnnnnnnnnnnnnnnnnnnnnnnnnnnnnnnnnnnnnnnnnnnnnnnnnnnnnnnnnnnnnnnnnnnnnnnnnnnnnnnnnnnnnnnnnnnnnnnnnnnnnnnnnnnnnnnnnnnnnnnnnnnnnnnnnnnnnnnnnnnnnnnnnnnnnnnnnnnnnnnnnnnnnnnnnnnnnnnnnnnnnnnnnnnnnnnnnnnnnnnnnnnnnnnnnnnnnnnnnnnnnnnnnnnnnnnnnnnnnnnnnnnnnnnnnnnnnnnnnnnnnnnnnnnnnnnnnnnnnnnnnnnnnnnnnnnnnnnnnnnnnnnnnnnnnnnnnnnnnnnnnnnnnnnnnnnnnnnnnnnnnnnnnnnnnnnnnnnnnnnnnnnnnnnnnnnnnnnnnnnnnnnnnnnnnnnnnnnnnnnnnnnnnnnnnnnnnnnnnnnnnnnnnnnnnnnnnnnnnnnnnnnnnnnnnnnnnnnnnnnnnnnnnnnnnnnnnnnnnnnnnnnnnnnnnnnnnnnnnnnnnnnnnnnnnnnnnnnnnnnnnnnnnnnnnnnnnnnnnnnnnnnnnnnnnnnnnnnnnnnnnnnnnnnnnnnnnnnnnnnnnnnnnnnnnnnnnnnnnnnnnnnnnnnnnnnnnnnnnnnnnnnnnnnnnnnnnnnnnnnnnnnnnnnnnnnnnnnnnnnnnnnnnnnnnnnnnnnnnnnnnnnnnnnnnnnnnnnnnnnnnnnnnnnnnnnnnnnnnnnnnnnnnnnnnnnnnnnnnnnnnnnnnnnnnnnnnnnnnnnnnnnnnnnnnnnnnnnnnnnnnnnnnnnnnnnnnnnnnnnnnnnnnnnnnnnnnnnnnnnnnnnnnnnnnnnnnnnnnnnnnnnnnnnnnnnnnnnnnnnnnnnnnnnnnnnnnnnnnnnnnnnnnnnnnnnnnnnnnnnnnnnnnnnnnnnnnnnnnnnnnnnnnnnnnnnnnnnnnnnnnnnnnnnnnnnnnnnnnnnnnnnnnnnnnnnnnnnnntcctttgaagaaagtggtgtgttgaagtctcccactattattgtgtgaggtgcaatgtatgctttgagctttactaaagtgtctctaatgaatgtggctgccctggcatttggtgtgtagatattcagaattgagagttcctcttggaggattttacctttgatgagtatgaagtgtccctccttgtcttttttgataactttgggttggaagtcgattttatccgatattaaaatggctactccagcttgtttcttcagtccatttgcttggaaaattgttttccagcctttcactctgaggtagtgtctgtctttttccctgagatgggtttcctgtaagcagcagaatgttgggtcctgtttgtgtagccagtctgttagtctatgtctttttattggggaattgagtccattgatattaagagatattaaggaaaagtaattgttgctcccttttatttttgttgttagagttggcattctgttcttgtggctgtcttctttttggtttgttgaatgattactttcttggttgttctagggcgtgatttccgtccttgtattgcttcttttctgctattatcctttgaagggctggattcgtggagagatattgtgtgaacttggttttgttgtggaatactttggtttctccatctatggtaattgagagtttggccgggtatagtagcctgggctggcatttgtgttctcttagtgtctgtataacatctgtccaggctcttctggctttcatagtctctggtgaaaagtctggtgtaattctgataggccttcctttatatgttacttgacctttctcccttactgcttttaatattctatctttatttagcgcatttgttgttctgattattatgtgtcgggaggaatttcttttctggtccagtctatttggagttctgtatgcttcttgtatgatcatgggcatctctttttttatgtttgggaagttttcttctattattttgttgaagatattagctggccctttaagttgaaaatcttcattctcatcaattcctattatccgtaggtttggtcttctcattgtgtcctggattacctggatgttttgagttaggatccttttgcattttgtattttctttgactgttgtgtcgatgttctctatggaatcttctgcacctgagattctctcttccatttcttgtattctgttgctgatgctcgcatctatggttccagatctctttcctagggtttctatctccagcgttgcctcgctttgggttttctttattgtgtctacttccccttttagttctagtatggttttgttcatttccatcacctgtttggctgtgttttcctgcttttctttaagagcctgtaactctttagcagtgctctcctgtaaatctttaagtgacttatgaaagtccttcttgatgtcctctatcatcatcatgagaaatgtttttaaatctgggtctagattttcggttgtgttggggtgcccaggactaggtggggtgggagtgctgcgttctgatgatggtgagtggtcttgatttctgttagtaggattcttacgtttgcctttcgccatctggtaatctctgaagctagctgttttagttgtcactgttaagagcttgttcttcaggtgactctgttagcctctatgagcagacctggagggtagcactctccttagtttcagtgggcagagtattctctgcaggcaagctctcttcttgcaaggcaggtacccagatatctggtgttcgaaccagactcctggcagaagttgtgttccactcactagaggtcttaggatcacgtgtggaatcctgtgtgggcccttgcgggtgtcaggcgactcagctggcaaggtagccggggctggagtggagtggaaggggtttgtgccccagatcaagcccgggtagcctgcttccctatgtaccgcagtctcaagttccacgcgattggattggggtaggcgctgtgttccactcaccagaggtcttagggtcccgtggggagtcccgtgtgggcccttgcgggtgttgggcaagactctgctgtcaaggtagcccggggctcgagtctcgagtcgagcggaagggacttgtgccccagatcaggcccgggtagcctgcttccctatgtaccgcagtctcaagttccgcgcgattggattggggcaggcactgtggtccactcaccagaggtcttagggtcccgtggggagtcccgtgtggacccttgcgggtgttgggcaagactctgctggcaaggtagcccggggctcgagtctcgagtcgagaggaagggacttgtgccccagatcaggcccgggtagcctgcttccctatgtaccgcagtctcaagttccgcgcgattggattggggcaggcactgtggtccactcaccagaggtcttagggtcccgtggggagtcccgtgtggacccttgcgggtgttgggcaagactctgctggcaaggtagcccggggctcgagtctcgagtcgagcggaaggtacttgtgccccagatcaggcccgggtagcctgcttccctatgtatcgcagtctcgagttccgcgcgattggattggggcaggcactgtgatccactcaccagaggtcttagggtcccgtggggagtcctgtgtggacccttgcgggtgttgggcaagactctgctggcaaggtagcccggggctcgagtcatgagtcgagcggaagggacttgtcgacaatcttttctttttgtgtcatatttgtacattatgtatgaatttttatataatactatgttagtaaaaaatccaatagtgaataattgtttacaagtttttgttagaatggattgttattaaattgttatatatttcttgctaactatttaggagttctagatatttatctgtaagtgagatggtatttatttagcactgtccaaaaagtgtgctatacataaatatcttgaacttctagtagttctcaaaatctgattgtttaacacttttatcctgtttaatttagagcagccatattgcagtgctccatagcctgccacactatgaagtcacctggccaggcatggagtaggttcagaaaataaattaggaaatttcattttatattatgctttgatgtttttcattttttaaaaatgtaatgaagattagtttagtcatttaatttggggtttggagatgttggttaaaggatacaaaattttaaaacaagggaataaattaaagaagtctcctttcaacatgacagctatccttaaaaatataaccttcaaaaatggatatggagtgttccagtgtataccaaagataatcatatgagatactgtgtttcattttttattgttgcttcagaaatccctaatgaagcaactcaccgttcaaggatgtcgtccatcatagagaagttatggtaggagcttgagacaactggtcacattgcatgtagaagaacacttgtattcagcttagattcttctttgtgtttaatcaataacctagttcatgaattgctccctttcacatttaggataagcatgtcaaattaattcaattaacctcaagtagagaatctttcacagatatcccagaagttagtccactaaaatttatatatatatatatatatatatatatatatatatatatatatatacacattcatacatatatgtatatttcatatattatagtatactatccatatacacacatgaatgttaatatttttgtatatgacaaatatgtaccatttatttgttgaaataggaaatttataggtttcacatttaaaatcttctgaaaattttgtaatttatagtgttttataacactggtctgttaaaattcctatttatatgatcagttttagaagttcttaggttcttaatttttcaattttttcatatacttatatctagcaatattacataatttggcattttctgaacatttatggttcctgtcttgttatttattttttatatttatatattttcttttacataacatatgactttctacaattgatttagtttactctttttaaaaataatgtttttgaatatatttctaaatttttatgtttaattaggtaaaatagctttttccaatttgtattttaaatatatattcctgatactggtatagaactaggaatttataagaacattggcaccaggaactcacataattattactgtgttccatattaactattataggaagtaaagttaataatttttgttgctttggctgtagagataagtgagaaaacatagttcataatagactctagttttacagcctgcattttccagagggtagtaatagtgtgatttagagtattggataatattttctattatcttgaaatataaacatagttttctgtatttatttaacatgattgtttgatgtaccatatgatacagttaagtcatttggacattgaactttgagttaaagggataacttaacactataaagaactatgtgaatgccatcattaccttgatagttaccaggcacctgggaagattttgttgattaaaattattgacgaggaaagaatatcaatgtaagcacctaacttcacatcactcaacctcaactgttttaattattctatcagtgccatcagtgtaagtgagcacatttcctctaggaaaagaacagagaagtttatcttgtttcagcaagatcaaatctgtttgcattgctcatcttccagttagtaatttgggggttgttttaagatttatttattttattttgtgtgggtgagtgttctgcctgcatgtatgtatgtacactgtatatgttgccagtactgatattggttataacaagatgtcagaattgctaggagcagagttagcaatgtgttttgagccatcatatgtgtgtatgctgaacacagaatcctgtcacagcctccagccaacagattacttgggaagatttaaatagaagtacttagatatttgccagattttatgtgtattattatgaaaacaaattttagtagaaaagttgaattactaaaatattcaaatattagaatagatgaattgaatttcactcattgtatattgtattcaagttattaaaaacatatttgtttttttcaaagaggttagctttacactaagtagaaatactgtctttgtgtgaaaaggggtgacttttaaaaagatattagtattgctttttagtgtattgacattttaaaagtaacatttttttggtaatacagaaaaaaatatcgtggggccttttgattggtaaacacagatgaccaaaggatggatttttaaaagctaagactggtatttatgtgtgtgtgtgtgtgtgtgtgtgtgtgtgtgtgtgtgtgtgtgtgtgagtgtgttgggaatcagggaaaattaaagatccactataggactaaataaaagctactagttctttgactacatggaacaagaaaacattttatgtatttatttttttgttctgattgactgcttttgcccagcagaaaccctatgatgtagtcttgcaagaagtggtcagctatcaaaccagttcatgtctactacaagtcatactgtacaccatggttggcagagtgctctgatggctttcaaggaaccagtgccagcactgggactttgtaaagatcgtgcctctgtattgttattagaattttgggtttagtctttgtttgacaagaaattgaattctgttgttggcaaaattaatcatcaatttagtgacctgacagtgtgtgtgcacacacacatgtatattcacattcacatgcatgtgcacacacacacatgcacacaagcatgcgtatatgcacacacatccacacacatgttgagtgtaggacagttgcttaaaatcaccattgttgtggtttaatacgattaaaaattactcttacatataaccttggcactgaatattatatgcaaatactatgtgatcaagactcttgtacttttaaaaagtttaactttttgagaaagtggtatctagattttattagaagaaaatgacttggtgtcttgggtggcaaagtttgacagaattcagagaaccaggattttaaactatagtcagctttcaagttgttttctgcctcttctgcctctcctcctcccctttctcctcctcttctctatctcaggtgctttggtttgggaagcatatttctaaaatacttttgaagtagatcttcatttactttccaattttatagatgttgcttgtaaaaattttggcaagatatgtgtgactatcctataattagtcacatttatcaatctgtatttgaaggatctccatagtactgcaatttgagtttgattaatttgaaagatgctcacatttttatagtatgcacatcttatatatttacttattctacttgtccctacctaattctttctaagtgttaatatgcttgctaataacacactccctaacttttaccccagatattttgtgaattaaataaacctcttgatgctttgttatttttgaaactctatgtgtttgaaagccaatttcttcatatatgactgaatatttagtagtcattttaaccattaagtatacactactttgaagaaaattatctgtcatgatgtggatttgttgtaatttgctttgtttcgggtacttattgtgtcttacattgcataatgttctgtacatgtgttttcattaattcatattaatctagtttatattaggcaagttagcccagagactataacaatcaagatgactctagacataaggaaagtctctccttgctcctgtctatagtcacacatactgtcatctgctctgctttctgcattcttgcaaacattttgttcttttttttttttgttttgtttttctttctttcacttgatcttagccaaaagactgagaagcgatctttccctttcccctttcccctttctcctttccctttcccctttcccctttccttccctttctttccctttcctttcctcttctcctccccctcccttttatctatctatctatctatctatctatctatctatctatctatctatctatctatctatctatctatctatctaaaactccagattgtatttttctcctggtccaccctctgactgttctacatcctatacctcctcctcacccccgtctccaggaggatgtccccaccctacaccctacacccaaccagacctctaaactccttggggtctctagtttcttgagggctaggtgcatcttctctgactgaacccatacctggctgtcctctgctgtatatatgttaggggcttcatatcagctatgtatgctacctggttggtggtgcagtgtttgagagatgtcagggatctaggtaaaggttaccttacttagactagctatccctgtcaatcacctctgtctacagttcttgccacaagtggtcactcagatgtcagtagatatatagaagggaatagtaacacatctaatgtgcattaggttttaatagcctagtatttctctttagagtttgtatgttaatgtagtccaagtttcttctatctactgaactgaaattatttcttcatgtggaaacatttgatatcttaacagttttacctgatttttgctgacctgaaaaacttagagacatataactgtatcaaaatcttcattttgcaaattgtctttctgattgttacttagtgtatttgtttctttcaaatcaagtaaaatatcactaattatctgaatacctgaaaatactttgtatttgatcattgactttacagctgtcttagttcggattttactgcggtgaacagacaccatgaccaaggcaactctttttttttttttttttttaggctccaacaactttattttgcctcccacaatgtatatatcccagacgaatctttcaagcagtatagaaattacaatgtgattacattccatttttcttttagtgaatgattatgaaaaaaaacacttcacagcacaagtaaagaaaacaaatttcttgggatccaggagttgcctcacaagccacgggaactccagtctcagacagggatagtattgagcattcaccccaggattgcccagggctatagaccagactcgggagctgactgtgacactgagtccagattctacaggacttttaagcctgaaatctacaaacacctgtgccaagttactcaaccaaccaggatttagggatagaggattttcttaggagcatgtctttgttgttcacttatcctgcgccaattggttggggtattcagctgtggcaggagacttacctaacctaacattcatgtcctaaccaaggcaactcttatgaaaaacaaaatttaattgggactgactctcaggttcagaggtttagttcattatcatcgaggcaggatcatggcagcatccaggcaggaggatctgtgagttgtgcattttcatctgaagcctaccagaagaaaacaggtttccaggcagcaaggatgagggtcttaaaccacacccacagtaacacacctactccaaaagagccacgcctactccaacaagggcacacctcctaatagtgccactccttgggccaagtatattcagttcgccacaccagctaatacttattaatgttgagtaagtgagattgtatttcataaaactaaagcataacactaaagaaaaactttaggatattttatgcaaaatgtgccaaatgaatttgaatgccataaaacatctaggtttttgctaatttagaacctgttcttccaacaccattgttttctgtgtgctctttttctttcctacatattcaacatttcctcgctttgcttgtccttttaactttcatgaaaaaataaatatacatctgtcttcccttcctgtctcctatatacacatttccaatttatattgcaaagaagtaaaatttaaaaattctactttgaattttggtactactatcttcttttgttccttctcaaaatttcagaaacaatgtttctttctttcagtccactgaaaactgacttatttccccaaaccataaaattacctcctcctatctcctcctcatcttcatccatcccctccttatcttcatcatccccttctcatcttcatcattccctcctccttcccattcctcctctttcttcttgctttgccgtgaccttactgtgtatgtcaaatatcatgctattttgatgaccattttcttttagaaatgctcctggattataacaagcttggcatttttctcaagtctctcacactcttttcctttgtacattttctccccttaaaatattgattcttcattctcattttctgatttttttccttttttttttacttcctattttacctattggtaatttatttagttatttcatttttagccctagtacattttaataatttccagatctatagctccagtcatttttaagcataaatcactagtttcagataatcattccttatatttatgtgaattccccaaatacactatgagcttaacatatctaaaagtacatttttatattccttttgagatagggtatattttactcagtttactctctgaaaatggtaagattattgacagatatggtttgtggcgaccttgagtccaaagcttatccctttcctctaacattttcctagtacagctatgttttgggaatatatgtggaagctagaaggaaacagttaacttaccttctgatagtagaaaaataaataaagtgcttatcatagaggaaaaaagtataatagaggtggttatttccttgtattgtctaaaatcacaacattaaccttctacatgaaacatgaattccagaaagcacacatgaacacccagtgtaaaagcaacataatgaatccttatgggctgaaatataagctgtcttcaagaatttttgtatttctgctactattaaaacaattattctctaccgctgatgtgtgtatgtgtgtgtgttcgtgtgtgttttgtgttgtgtgtataattttttttttatttttttgatcccatgtcaatagtgcattcatagtgccagaacatacagtgcaggctgctgaaagagaaatgactttcatggactacctagaatctttacaatgtataatcctaacattccagggaagacacgcccactgcagcagttgtggcaggccttaaagggaagcaagtgctatctgatatgcttggggtgctccagaagatgctatgcatgtctgaaactacaaacccagttaaaaaccgaaaactggaggaaggctgaggtcctagtgggggaacttaaaaaatgtaggttagctaggttgacacagtacaaagctgccttccaaactcaaatgtttaaactcatagacaaatagtattgtcagtcttaatcagagagcctttgcaatgaaaggtggtgaattgaggcacatagttgcctaagacattgagagtaaatgatggttaaatgctcagcctgaagtaggacatatgccccttccaaggtgcaaggaacaacggggaagaggggcaggaagcttttcctcattttctttaaccttgttcagagacttatctttttacagtgtcagagacgaataaccagtcaaaattacaacaataagcaactgggagttttcagccataaatgggatgtctttatcaaccctgcccccaagaaccagaggagattatggaagatgggtggaaaatgtataagacagtacaaattctagagaagaaggagggcctcacatggccccactgcagctgaagaactttggccattgattgtgctgtgggggggggggcagttaaatttgaggagcattatgactcgctggtaggttgttcatgtgtcagtttacataacacctatgttcataaagacaacaataactgcgctcagtgcatcatggaatagaaaatcatgtgagaatgggaaggggatgtgttgtgagggcctgagactaatagatagttttacaatatattttcataatctacaaaatcctcagaaaattaaaaaaaaaatgtcagtagacaaggggccacatatgtaaaggttgtgaagctaaaacattcctgtaaacccagtgaaatttcatttttcttaactttgaaggccagtatattttttcttgtcattgtggtgaacctggtggaaataaacctactaatgccagtcataaaagcatagcacagacagtcacatatagcacatagtatttgagaagaaaagccaatgattccactcatttttgtaacttctgtagtgtggttatgattattttaaagtgtatttctgcttacacagagctggtgcacaatgggatctgtgttgtgatggcagcagcttcctacactccacattcaccatgtcgttttaaaaaactatttcttttatttttgaattcataatataattacataattcccctttccttttcatccctccaaatccttacatgtatgcccctccttcctttcaaattcatggcccccgtaggtcatatcgtatgctagcgttgaatgtacagatcagttgagtaacctgctccagggaggtctgtatgaacactctgtgatgacccaccaggagcaagattgcctatggagggacttatgcaaactgggctgggctcttgttaagtggcaaatgattctatgaagcagagtcaatctaaatgtatctagaacatatgtttctgctagtgtaatttactgtgatcaaaagttttgagatgctgggcgcacacctttaatcccggcacttgggaggcagaggcaggtggatttgtaagtttgaggccagcctggtctacagagtgagttccagaacagccagggctacacagagaaaccctgtcttgaaaaaagttttgagaatagtttttctctttttccaaccaacatgctatatctacttttgtaatttcaccaagcccaaataatagttaattttaaaaaaataattgccagtctagtaaagtggtatgtttataaggctaaggattttcgggttttttttccttcagtgaatgatgtttcaccatcttcaactggactatatatatttcatttttcttcttaagtttacttcatccttatattggattttactctatcattgttcacaaatatttttatgctaactactttatgcttacatttttacatagttacctcagttgaaatgtagatgtcatgttaatctgtaaatttctcagtgtcaatctctttcatacgtttttctacccagattaaaatttgaagttataactgggtagcacaggaacttagtttttatttatttatattttatttatttgtccctcttcaccttggctcctcacctcctttggccagtgaagaaaacctactaacataattggagtttgctgtgtgggtggtagtcccaagctttaggatcaggccttgtgtgtgcacattggtttctttctcccatttgttttcattccaagtgcctgcttattagtaacagaataacctttcataaaatatgacaatgttctcataggtttcttctaaaagaggaaattattgttactgttgattgtttatattcccttgtaaagaagattgggggggtgttagtcggttttgttgagtatttctcccacaacattaagattgtcatacttttcagtaaaaattttccctagattataagccacaagttcaatgctgtgcattgagactggggtatttatgtattatgcaagcactctgccactgagcaaagtcatctggcccatgtatacattttcaagttcttgctcctgagagcattctagtgacacatgttgattgccaattctgctcgtctgtggccatttcacaactttgtttagaaaagctctagaagtggaaggacagagaatgttcccaccattgaaactgcttttcattctcaggtcccaggtctaactactagatgattgtgagcatcggttccataagtatgtacttgggattttcctgtagaacatagagttctctaggtttttctctgctaggaaacttagcaacaacaaatgagaaggttgttgcagtggaactcatagtccagtgtctaagtcagtgtctgtcatggaaaacaaacactgattcctgtgtcttttctggtctgtgccttttttttgtttttttattttttattttttctcattagaatattgacttaagcatcatgtcacagaatctagagaaacaaaacaagagaagacaaaacaagctcattatactgtcacacatgcaaacttgaaaatttgctgtcaccagtaagggcttgaggaggaaaaagatattccagtcaaatcctgttgggtctttgaatggcatcatggctggtaggtctgatttaagaaaacagcatgaggagatgtggagaggctacctgtgcccccttgtgcttctgctgtatgatgctctcagatgcccaacacacaattgcaggtagaccccatggcttattattttattcaaaactggattgaggtgtgataagtttcacaggattacgggaaagaacataaaacaagaaattataggttttttaagacaatgggaaatgaaaatacagactagtatttaaataaacatattctttcagcatgataggtaagtaaagtaattttcaaccaggtcatcaacatttttcaagaaacatggtaaaaataacactttgatatagaagctttcattgcagtggatcaagaagtataaatatagcataatatactatcatggaagtatgcaatgtaaactgagttaactgttgaggaagcacaaaagcatattttcatagtgctttcccacgactacattttgaggattctgaaattttgaactattgaatttgtatttttccttttttattagatattttcttcatttacatttcaaatgctatcttgaaagtcccctatacccacccactgctccccaacccacccacacccacttcctggccctgccatttccctgtattggggcatatgaactttgcaagaccaagagcctctcctcccattgatggctgccgactaggccatcctctgctacatatgcaactagaaacacagctctggggggtattggttagttcatattgttattcctcctatagggctgcagaaccctttagctccttggggggtccttgtgttccatccaatagatgactgtgagcatccatttctgtatttgccaggcactggcacagcctgacaagagacagctatatcagggttctttcagcaaaatctttctggcatatgcaatagtgtctgggtttggtggttgtatttgggatggatcccctgtttgggcagtttctggatggtccttccttccatctcagctctgaactttgtctctgtaactccatccatgggtattttgtttcccattctaaggaggaatgaagtatccacactttggtcttccttcttgagtttcatgtgttttgcaaattgcatcttgggtattctaagtttctgggctaatatccgcttatcagtgagtgcatatcatgtgtgttcttttgtgattgggttacctcactcaggatgatatccttcagattcatccatttgcctaagaatttcataaatttattatttttaattgccgtgtagtaatccattgtgtaaatgtaccacatttttttatctattcctcttactttaacatatatatggtgaataaatgctatgttttatatatattatactgaaatttgtgaacacagtaataatgaagaatagtgtatgcctattatcattctaaattagaaggtaccatctgtctgtcactgcactgatctatctaggtatatatgatctacttaacgatcatctatattggttggattgggtatgtacatgtgtgaatatgaattcacatatgtgccatctgagtattgatccacatgcatgcacatatactatgtaattcttcaaatatatgaatatttatttgtaggtagagctatatattatatattttagttttatattggtaagaaatatttttcagtgacatttttaccccaataattttactctagtttaattctgtttatttctaaaaattttggggagtgcccagtgttatcaaccaaatattgaacaattactgattcatatatgcaaaaatctgggggatttgttattttgtatgaactttacatctactaatatagttcccttatggagacagaaagatgtctcatttgccatgaattcctgccaggaagggaaatagtgactgctgagctaaaagtatagatcattgggttaatcagtgtaccattccagtccttgaaatgggagagaaaggctgtgttataacattttcaaaagtcaaaattacacacacacacacacacacacacacacctatggatacacaatacacacacacacacatacacatacacacatgtggcatctcacttttaaaatcattttcctttgcatcttttgttctttgatcttcttatgaacagagacacatgaagtagcaatgaggccaagggtgctagttgtcttggcattcattaactattgcaattagcactatttagattgatatttttccaagatgaaagcatgatttggacaagaaaaaccaaaaaaaaaaaaaaagatgacatttgtaaaagtggaatgacattgaccaggaagaaacaaaaaagaaacagagctcacctcagaacacttggatgtttgaaatattgattacatgataagatcacttcaatgtaactgtacgtctcttaagagttattaatggtttggtggtattaaagtaaaatgaaaagacaccagggcagcctgccttaatagcttgctggcttgaaccctgatacataatgttcttgtaatagtttatgggtgactgcagtaaattggtagtgaatgttttccaattttttggctcttcctatcagatctgttctcagaacattttgttctgaagatattatgaaagcaattgatctactttagaagttgcttgacaattttaatatagcaataactttcctctagttcacattgtgtgacttttttttttttggtctttgtaacttgtatcaaattatagttgggtcatatttgagtagtttggtaatataaattaccaagtctgatgaaatatttttaagtactgctacaaaagaaacatctagttcttcaatgatttttttgttgcccttatctatttagacagaggtttacatctactcttcttgaccgaatgattttggaaggattaattttgaacctaaatacctttggcgaattgttttcaatcatattgaaagagtatactttatgtaaaaatgaatatttgcactactttcatttttgttgctgtgataaaatactgtgacagaaagaaacttagggatacaggatttattttaactcacaggttctcatagcaaggaagtcaaggcagcaggagctgaaaacatcataccaacaatcaagagcagggacagaaaaatgcatgcaagtttagtgctcagttttcttgctgcttatacagcccacagcctcagaccagggcatggtgctgcccacttttagacgggtctttatatatcaattaaaacaatcaatgcagcctaacttccacgtaggtcaatctgatgaagacagtcttcactgacactactgcaggtgattatggattctgtcaagttgacaaactaaccagaactgttccatggcaagattacaacattctaacaaaattagcctgagaattgtctgggattcattaattatctaatatggagttttgtggggcatcatacaatctctgctttggttctacaagcagtacatgtttatattatacatacagtaaaaacaagaattatagcacgaacagaaattgaaacagtttctatgctgacattagagctatggagaattgtagtctttgagtattttatatatttttttcgttgttgttcttgcgagcatttgtttcatagaaatgttatattacaatattactgggataagggcaaaaggcaatttgggagaatgtgagataaaagtacagatacatactagccacccaactagatggcagatccagtctttgagcagaaggatcttactttgacaaatattttctttctttccagtttcccatttgtcttatgaggtgtgatcaagcagatgaaatttagagactttatttgggctgtactcatattcttctgtataagtctgcattttattcagaatccttgggatttttagagcctgactctctctctataacaaatcccttgaaattagtattagcatgtgtaattgttcagcattttcatgtgtctcttaattgtttcttttatatctaattttcaaggtttcctgcagttatttgttaataactcattttaattgtaacagttttcttttctggaatatattctcatgtaattcgatgtgttttcagtcatattgtagtttaatccatattttcctgattcttataccttttaaaattaaggaccagtggccagcatggtggtcagtgagtaaagggacttgctgcataagcctgacaacacaggaatgtttgatacccagatatgtatagcattattgttaattaaattaatatataatatatatctttgaatgtatttattaaaattcataattttgcctttaaatgctctgctaaacccttttggggtactagagtactataaaaatacctgaatttgtaaaaggaataatctagtaatgtatatgttttctaaaattatatataaatgttaatatataaaatggtataataggcattctgtctatattccaatttttacaataaaatctctagaaatacagtatttagaagtaaaactcagatttttagtcttacaggcttttgtaacaaccattcagtaaccatacatttgaggttagatagcaatgaccagatgaatactatatgttcactctctctgtgacattgcaattttgatatactcattttttcatggatgattgtataactttatgagctataatgtcatgtttcatggatatctcatttgtagatataccattttcagcttatcatttcattatcttgaacacattcaaatttatttcttctatttcgaaatatgtatagcatatctagcattgttaattatattaatcctgctgtgccatagaataccaagtttttctatcaccataacatcaataaatccactatgcaacagctaatcagtaaatacattgataaagaaaatgtaatataagtacaaaatagaatagtattcaatcattaaaaagtgtggaattctgcaatttttatagagagacctagcaaatatgaactaaaaaaatcaggcacaggaagagtaagcaacacattcagaaatgaccacattcagaggtgggatatgtgctggttgatcatggaagtaaagagcaggataatagttatcagggactgggagatatgcacaaaagagatgagagatcactcagcatgtctgttttattaaagcctaacaagctagctgaggtcattaaatggactcaggattatatgttaggaggattaaacatgcaccaaggccggttaatttagagttgaggatgattcaggttttttagtttcacagtagtgtcagttatctctggatgtttttatttgccgttctttgtcttttttattgtttgaagcatagctcttaacaacaacaacaacaacaacacagcaacaaaaaaaccctaagacccccatttttttctctgtagaatatattagagagatatttagaactaggaatagttgggcctgtggtagacaggagaaaactgatattcagttggaatcttcttccccataagacataccaaacctctctctgctgtccgcttcttgctccagcatagttcccatgtttcaaattaagaaaataaatagaaatcgtctacttgggaaattattgggaaacaatataaatatttgagcaatatttatgagagaatatagctctttttgagaaaaaaaacaataaggctattaaagatttaaggagtgagaagatcaatggccattaatatttcatggaaattaatacggatgataacatctagagttcatatatgtgtactcaatgagcagatgtcatccctcacccctttccttccttgcctctaacttctttttttgcattttattttttaatattaattattttatttatttacatttcaaatgttttccccattcctgccccctccacaacctccccacccctcccccctcccctttgcctctaagagtgtgctctcccacccatccatacaccaacccactcacccacccacttacctgcttatccactctcacctcatatctctagcattccctttctctggggcaacaaaccttcacaggaccaggtacctcccctcctctccctcctctcccctcctctcccctcccaccgaggccaaacaaggcagtcttctactacatatgtagcatggcggggctcagaccatgtatgctctttggttggtggcttagtccctgggatctctaagaggtctggttagttgatagtgatcttcctatggggttaccatccccttcatctccttcagttcttcccacaactcttgtatagggatccctgaactcagactatgtgagctcagacatatctgcatctgtctgtcaggtgctgacagcctctcagggagcagccatgctaggctcctgtctgcaaactcatgttggcatcagcaatagagtcagggtttggtgtctgcgcctgggatggatcccaaggtggggcggtctctggatggcctttccttcagtctttgctccattttttgtctctgtatttcctttagacaggaacaattctgggttaaaaattttgagatgggtgggtgtctccagcaactggaggtgtctcttcaggttctgtctccctgctgttggccattttggctaatgttattcccattggatcctaggaacctcttgcatccctggagtcttaacttgctagtggttccccccttcccctttcccacccagatccctcccttcctctgcctcccatgattattttccccccttctaagtgggaatgaagcattcacacttcagcctcacttcttgttaagcttcatgtggtctgtgaattgcatcatgggtattctgaaaattttggctaatatccacttatcagtgagtatataccatgtgtatccttttggatgatattttctagttccatccatttgcctgcaaattttgtgatgtcttggtttttaatagctgagtagtattctattgtatgagtgtacattttgattacaaactggtacaactgctctggaaatcaatctggtggttcctcagaaagttggaaatagttctgcctgagaactgagctagatcactcctgggcatatacccaaaagatgcttcatcatatcacaaggacacatgctccatccaccatgtcatagcagccttatttgtaataatagccagaagctggaaacaacctagatgtctcctatcctctaacctctgttttcttttctttaacctcttatcttctatcttagtttctttttgatcttagccattcccatgattttagttattgtctattagttgattacagtcatacttttattttaaacaaaatccttttcttgaccatcagtcaccaatcctcagttacctgcctctgtagtatttggactaatctgagtagtattggtattggtcttattctatatgcttggtggaaaagaagtgcccaaggattttcttattatggactcaaggttccttctgtctgatgttcgttgttcaggtgctatttctctgtggcttggtcttgggaaggtggctgtggagaggaatttgcttgttcacctcggttatgaagttggttggtgcatcgttctctcattcatttatctcctgatcttttattgtctcctttctttgctgttgtcctgtgtgttgctttcctatttcctgaggccatgtcttctttacatgctaatgatgctgactggaaactgggagcagatctaacagtaaccataggtcctgggatttagagtgatgtgttaaagaagtgcctacacaaagctttgaaaacacaatgcttctcattttgtctgaagtatttcaagaatatataaagacagaattaaaataataaatatcaagtacatatcactcacatttttaaaatggtagcatttggtatactttcttgagataatttttttataacttcttgtgtaaataattgcctgctctttacatttctatcattttacttctgaaaacaaccactttctcaaggttactgtgtatgcctcagtacacattttgattatctttgttttgcttatgtctttaggcatatatatgtccataaacacttcatgcagttttataaacttgaatgttatataaatcatatctcctcacaacttcaaggtttctactctatacccttgggagctgcaggtgtgagtacaacagaaagcacctagggtagcatgatttatttaaaattttaagggaaaacatagtcatggcaaacattttcagatagcagggtaaccaccaatttgaggtagcatagagttttaaaatttggtattactatatttcgctcaatggtgtcatgttttccatagctcagcttggcactggtgccacacaaagtaggcactatgtgaaagtcaaccagatggtaggaagtaatatggtaatatcaagtctgctttcaagatatcagaaattgtccagtgcacagtagacactcatatccctataatatgtttcttgaggatggctatccaaagtgaaagtgacagggtagctctgtgtaaccttggctagcctgggaatggctatgaagccagactacactagaacccatagagatgcactgcctccgtcccccctcaccaggtgcttacccagctgaaaatactgttttagatatgtcttcatatattatgcagacaaagattgagttgcttaaaaccacctactctataaatgatgtggacaattctaactaagagaaagacaacagatgggcctagtgaacatactttgaccttatttggtagtatagtcattcataatcatcagttagtacagatagacctcagcagttagctgctagagactctaactgtcttacggaactacaggtttctagttccagtgatggacataacctgtgtttctcatttcctctcctgtgctgtttcttgcattgccttccttcccccccccccccctctacccctggtttcccttccatcctgcctttcccactgcatccttactttccattcctgcctcttgcaaccttcatctaatttctttctttttggtgtttttattgcagtcagtattaaaataaacattcttataaacattcctttgtgtgcatgtaggaaagccaccatatttgaattgatgagtttaaactttaaaattgaatagaaaatagttgtctaaatgtgtctcagtttcctttgtttagtcttttctgaagctatagatactggcagaactttaaattggaggtgacagaaatgggaaataaagtttatctttttcgtacttcagttttatttctttatggattaacatctacccatactcttttgcctaagcaactttaatttccaataatattttaatcatttaaaacaatttttaaaattataatgcatatcctttattttaagttatgttatctaaacataaagtttttgcttattacctattttgcaaacatattttcctatgtattgcatgtattttattaatataaacatttttccttattttgaggaatagatgattttctacttgtgaaggtagtatgaaactaattttgtttttaatatttaagctgtttttggtatatagataaagcagacatagaagtgactatgtattctgtttgtcttgaatcaggtgtggtccttctggctcttctttacaattactggggctgcatgcgtatacacacatatgttctgtgcagggctttttgtatagtgatgtttttttcttgagtccttgcaaggtgcttaaccattttcttccatcctttaatacagcatcttcctctgtttactgagcactcctgattgttctcatgcttgatgctctcattggtgttagggattggatgttagatattggttctaaatagggaaatgctgttttgtaaggttctctgacacatcactggttctaagagttcacatgacttttacccacagccctaaggtgatctatagctttctgcagtatctccaggctgttctgtagacttttctaaattgagtggggaatactaagctagggtgcatttgttctttttcgccttcagtggcttcaggctttgtgtctttgtatatcatgccagttacctggggatttgtgggcatgggatctttggaggcatcaaaccttctgtctcactctggtatttcttctaaagacacttttaaaaaatcttttataccaacttatttcacttttattagcaaaattatactgaatatctctggttttaaaagaagtatgagacagagtggtctgtaactcgtccttttcctaagtttcattgagacctttatgccagctttagaattgcttatagttactgcctgccgttattgccatatagaagatgtatatgatttatgtatttagcaattcatttgaatcccatttctcttattcttttagtggatgacacacctgtttgtgttattgtgccaataatatgcagttttttgaagaataatatcattcaaggtaacataatattatacatcttgtatttagaaaaaatggagagagcgagagggagggagggagggagggacagtttaagagaagagagagaaaagactgtagagagttgggtgattagacagattgtaccaaggggactcaactcttgagcaaagttagttttaatcttttcagtgcagcagatgagctgtagctgaggcagataaatcattccagccccattctgctctccccttcagctcactgcacagggcatttttgtttttcacatgtaaatgggtgtgaagttgagaggtttgcacttagccttaattttggcactttatgacttgtactctacttttggcttttctgagtgcagagtaaatgactgtcagttcgattgtgtgtgaaagctcctgttctatcatgggatattatcaggaacccaggatcagcaaagctgtgttcttttggaaatgcttttcttcaccatgatgaatgcccatagcaagagcagagctaataaccctattcatgttccacagaaagatgagaacacttcatcctcttttgcgaatatcacatttttgattctccttcattttagggaaaatcgtctctctaattatttctttaatgaatcagatagtgtatggagcttttgaaatgttattttccagatagattcaacaatcttaccatctattgtgtaatttagtggtaagctttttgcattcatcatacttgggaaggtcaagcattttatgacctcaaaaagcttgatccttgttttgagcagacaattacctaaatgttcccattatttcgaatggatatttcaaacatctcaaggtttccctttactaggagtctcaagtgttttcttttactgaatacagaattcaactgaagcagacttttatattatctaaattttcttatgtttttctcattttattttaaaagatactatggtagaacatgctgatataactttaatgataaactttacatttacatgttatagctttggcatttctgcaagaccccagttgaagctaaaaaacccatattttgacactgtagttgagagattgatatagctagcacagataaaatatcacattatatgacagactgtagagtgcagtttattggttattctgaatggttgggttgtaagctccatgaagttgattggcagtggcatttactacagatgctataggtagaacagagagtagaaaatggtggtagcaattaataaattgattgctggattaggtgacatatacaaacataaccttagggatcgacgtatcccataatgtcctttatcacacaatgcacttgcacacacacatgcacacacttatatttcatataaagcagtgtacataagacataagttgagtttctacaattggtcttttttgaaccccatcttattaaagtctgattctaaatcctcctgtctttattctggattactcactgatccgttcagtcaaggtctgaggatcttcccatgtcttgtttctttctttttttttttcccataggagtgtttttattatgctgttttctgtaagcatgtatttttcttcatttcaattgtcttacttatttttacatataattaagaaataaacagtactgtgctagcaattgtacatatagaaatctgaaatttgcactctagttctacattcaaacattttttttattattaggtatttatttcatttacatttccaaagctatcccaaaagtcccccacaccctcccacacccactcccccacccacccactcgtacctcttggccatggcattcccctgtactgaggtatataaggtctgcaggaccaatgggcctctctttccactgatggccaactaggccatcttctgatacatatggagctagagacacgagctctgtggggtactggttagttcataatgttgttccacctatagggttgcagatccctttaactccttgagtaatttctctagctcctccattgggggccctatgattcatccaatagctgactgtgagcattcacttctgtgtttgctaggccccggcatagtctcacaagagacagttatatctgggtcctttcagcaaaatcttgctagtgtatgcaatggtgtcagcgtttggaggctgattatgggatggatccccaggtgccgcagtctctagctggtccatccagcagaattgtattaggatacagccatacttgtttgtctatggttttactgccagactatcatggtggttgaagagctgagaagaaaattgtatgatccaaaaccctacagtcgttatttggcctctcacaggaaaaggttgttattttatggctcaggagactcacatctcaggttgtggaaacatttgggtcataataaagtcagggggaaagtattatatctgtgtgttacacagaaaaaaactgaatttgcatggtacaacacccccagtcttccatgttttgtgggaattgatttatcattttttagtaaaggtgtgaaatgattgtcactgctactgcttttacaatttcattcaacagttctccttggcatcataaaaggatgtggtgacttattagaagtgtagtgggggaatatggaaggagggatggttgagagaaataatgcttgttctttttatatgtcaagtcattttgggtctgattctatagcattctactttttccctcaaattaatcttggacttttttcgcatattaggggcagtacactcatcagcctaagattaactaaaaatttactttgtgcattttaggtgcttaataagtctttatgacttgaatattaatgtcctaataacttctctgtattcatttattcattattcaggtatttgagtgcttactatgtgccaggcatgacatagagagtgcataggcaatgaacaagacacatggcatctctaataagcgacctagacagtgaataagtttatgatttttaaaaatggtagttataacctagaaggaagggtgggaagttacaagtgaattggctaacaaaagtcacatagcagggtagacttatttggtgcagtttcagttggtaactgaataacgagaaagttaattgttagagagtggtcaagaagtatcttttagaagagcaagttcaaaactgcagattggctaataaagattataacgtggcagttacaggaaaaggggtggtgttgttggtgggttgttttttttttttggtgtgtgtgtgtgtgtgtaaatttaggaatgttggttgtgtgagagtgttagtggtaacaaggcatgagattagtttatgcatgttttcctagattttcaaataattgatcaataatctataaatagaaatgttggtgtatctgaactaaattaattacatgtatgaatgaaagcaaagacctgcatagtacaggtaaaagtaagggaagagtagagaaagaaaagcattgaagtaaaacttcagggtattcagtattagtgattgttttttggtcccaagaccaaacatcattaaaagccactacctgcaccttgcttcctattgatgcagatttttacccagaaaatagtgagtgaactggaaaatttaaggaaaatgagcattcaagtaaatctggggcgatagtgagaatacagattaagagacattactactgatatttgtcctgactgcttttgcttcttttctatgtaacttggtacaagttctgtgagaggagcgaactacagttctgaaaatgtcatcatattggcttgtggacaaacctgtgtgatattttcttaattagtgatggatgtaggaagacccagcccattgttggtgttccccctaggtcccttgtcctggctgcagagaaaacaggttagcaagccatagactgcatactcaccatcagcattcctacttgttctctgcttcagttcctgccttcaggttcctgccttgagctcctagtttgacttccctcagtaggtaatctgacctgagcatgagctgaaatacagctttccctcatcaaatagtttcctgctcatgatgttttatcaaagcagttgaaaccccaactacgacagcatgtaacaagaaattaggacttctagtgagcaagactcaggtggctaaaaatcattccaaagcctgcagtttcaactaatgtcagcctcatagaggcaaaatacacacacacacacacacacacacacacacacacacacacacagacacacacacacacacagacacacatgtgtatgaagatggacgatatgtggaaaatggcatgtttagatcaacacagaagtaaaaggacgaagctctacattatcaaagaaaaaggtaactgcacagagcaaaactagatctggttcagagtcaccattgtaccactctagggaggactgtaaagaggaggctatacagaaatggtggaagactgaaaactggggcatgcaaaggaaattaactttgaaccagaaaatattcagaggttttttttaaacacaaaaagtataggaaattattaaaccttaaaatatataaatgaaaatttaatttaatccaacacattacctacagttttatctcagcgacatttggcttaaaactgcaaaattcttatactttactttaactattcccttgatgtcactatgtcagatatagaagacccccacttcttttgcaaagggtcttcattatgttgtcttatgtctgtttgtccactggctttctgtaaaactttcttcctgtgtgtcttatcttttaggggtttgcatgctctctcccattttccccttgtttatttgtggcttgttagtatctgcttgtttgcatttatatgtagtgagaaatgcaatgaaagttaagtggattgaattttatagctaaatcctctaaaccatatggatgcgatttatttttggtattggcctctgctcttcaggaatctattcagtatataaaggctgattcacttgaggcaaatcctgtgctgaacgttggtcattctctggcagcaatctgtcagggagcagggcatgccgaggaagttctcacagtggagtctttgacccctgatataatctacctgctttaactaaccatgttttttaactttaatattttattttatagatacaatttaagcctagagaaatggaacaatcctatactctgtacatttctccagacaaattactaatggcagctaacttttatcataagattgtgcatccattttattcctccaccagactttaggatgtacatcatttgataatctgtcccttcagaacagtttccagaaaggatattatgtggtcagttttattgtgtgcctcaacaattattgagatagtatcttatttttccatctggggcactatgacaaatttataatggtatacaactgtcagtgatcaaatatggtaccaacttggtaacaatttacaatccccccaatgaatttacctgggaaagtgctgtgagtgcttcatccattgtagtatagaggtaaacttgtgttaaatacaaaggcaagtctgtggagaacattagctcataaatcctgggaactttttatgtggtgtaatatatggcccagaagagtgaagttcacagtcagactgggtaagaaccctgggagaggactttcagcagatggcctagcctcttagctgtgtttacaccagtccactgtgagagatgatcctctttctagagtttgtgcgagtctgagggaagtaaaagtacagacttgcacagactctaaagaagtgactgctaatttattttctgtcatcatttaatttttacatttaaaaaatgacaactacgtagctttttctctgatcctggtccttctgagagttatgaaattaagacattcttttatttaaaatatggagtgatctgtaagtcccattttgttttaactctcaaaatacttgtgatacagttgacctaaaagtagaatatttaaccttgacccaagactaaatgaagcaaaattgcttttatacaccacaaagaacagagaacagtattaggaggatcacttcaaaaggtagctttgaacatcccttgcatgctatggggtcatgttagtcagcccagtctctatgtcttaagtatttagaattctggagaaaaatgaaatacaagaagctttcatgtaggtaccagaaaacaattttatgattacatgcacttttgtcttgaaaaatgtctttggtttttatttattatcccttatgactgcctaccccaaatgattaagtaagatatgctgtgaaggccatgtaaatctttggaacaaaaagtagacatacaagtcccaattaccaaagcagagatggtaatacactatcttggacttcagtggaatggatcaaaagaaaacgttttttgttttgttttgtttttacttgtagtataactagacaacttaaccatgttccttgaaattcagtgtccctgtgtccagaagcagccattcttcagtctgctaactgatctggcgtagcccaagaaagtggtgattttgtctactaattgttatctttttatgtattataagttcaaagttatttttaacattctcccattttataatcatgtcttccttccagcatgtttagaaacgagtgtttaataaatgattgtttccaaacccttatcaatcagtaaatactaaatacttgtgctcattctgctcaactcttctgaaatcaattatatgagagattagggagagttccaggagaaggagttttagtaatgtttgaaatctgaaaattgtattctactcttaagtatttgtgaaagtatttaagcctatttggtgtgtttaaatttgtattattaaaatgacttaaatatttttaaataattattttttgatttctcagaaagggcacatattctaaattcataaattttctttaaaggcaattaaataaataattcagaagtgtattctgtttacctgttaataattaagcaggttagtctgtgtactctttatagtcattgagttttaatttatttatttgttggtatgttggtttttaagaatttatttaaggacttctgctattggaggataaaaacaaacagagtaatgctgcacagtaccgcaaagggagctttgaaaggacaagaaagaaaaaagaaaagtcaattggatttgaggctttaaaagtagtgttatataaacaaccctttgaactttgtccctctatgtagaaaaatatggtgctgagaggaagtttaattgacccaaagcaatggctttggaattgtcctagaagtctctcccagtggatttgttatgatttctaatacccttgcttcagggctcagctgggccactaatgtgaaaaattcttcaagtcaaccatatgacttattccatttctgtggtgttgtgcattaatattcaaaaccaaaatgattgcctccatctaagggaccaccattatggaaaactagaactctatttgactttaaattttttcagtgtcctaaaatttttttttctgcttctgtcctttggttgggtgcaaatatctgcatctgactctttcagctgcttgttgggccttctggagtgtggacatgctaggtccccttttgggagcccgcagtaatagtgtctagccttggaacctccccttgagctggatcccactttgggcctgtcactggaccttattttcctcaggctcctctccatttccatccctgtaattctttcagacaggaacaattatgggtagagatgtgactgtgggattgcaacctcatctctaccttgatgtcctgtgttcctgcaggaggtggatgtgtttcatctaaggtccctccttttgagttctgtgagtctctcacctcccaggtctctgnnnnnnnnnnnnnnnnnnnnnnnnnnnnnnnnnnnnnnnnnnnnnnnnnnnnnnnnnnnntctgctgacccttacttagggcttcagtccttttccctcacccaataccagatcaggttccccttttccccctcctacttctcctggctccttccactttctatctcaggtccctccctctgtctgcacctgtgattgcttttttctccttcccaagtgggactgaggcatcctcactggggcccttcagcttgttgagctttttgagttctatggtctctctctctctctctctctctctctctctctctctctctctctctctctctctttcttcctgcctactatccatttattagtgagtacagatcatgcatgtgcttttgggtctgagttacctcactcaggatgatattttctagttccatccatttgcctgcaaattttgtgtttttaatagctgagtagtattccattgtgtaaatgaaccacattttctgtacccattcttttgtcgtgggacattgaggttgtttccatcttctggctatcacataggctgctatgaacatggtgggatgcatacccctgtggcatggtagggcatctcttggtatattcccaagagtggtatagctgggtcttcaggtagatctatttccaattttctgaggaacatccagattgatttccagagtggttgtaccagtttacaatcccaccagcaatggaggagtgttcctctttctccaaatcctatccaatatgtgttgttacttgaggttttgatcttagctattctgattggtggaaggtggaatctcagggtcgttttgatttgcatttctctgatccctaaggactttgaacatttctttaggtgcttctcagccatttgagattactctgtttagttctaaaacccattttttttattggattgtttgggtttttttggtggttatcttcttgagttctttattttggatattagccctctaggatgtgggtttagtgaggattttttcccaatctgtaggttgcttatttgtcttattggctatgtcttttgccttacaaaagttttccagtttcatgaggttctctttatcaattcttgatcttagagcatgagccattggagtcctgtttaggaaatttccctctgtgccaatgagttcaaggctctttcccactttctcttctattagattcagtgtatctggttttatgttgaggtccttgatccacttggacttcagctttgttcagggtgacaaatatggatctattttcatttttctccatacagacagccagttagacaagcaccatttattgaagatactttcttttttccattatatatttttggtgcctttgtcaaagatcaaatgacaataagtgtgaagtttcatttctgggattcaattctattccattgaacaacatttctgactttgtatcaataccatgcagtttttatcactattgctctgtaataaagcatgaggtcagcaatagtgattcccccagtcattcttttattgttaagtattgtttttgctattctgtgtatttttgcctttccacatcaatttgagaattgctctttacatgtctttgaagaattgtgttgggattttgatggggattgcattaaatctatagattgcctttggcaagatagcaatttttactatgttaattctgccaatcattgactatgcgagattgcttcattttctgagatctttgatttctttcttgagaaacttagagttactgtcatacaggtctttaacttgtttggttagagttactccagatattttatactatatgtggctattgtgaagggaattgtttccctagtttctttctcagactgtttatcctttttataaaggaaggctactgatttttttttttagttaattttatattcaaccattttgctgaaattgtttatcagctggagaagttctttggtagaatttttggggtcacttatgtatactatcatatcgtgcaaatagtaatacctgtatttcttctttaccagtttttatctccttgatgctttttttttggtcttattgttctaggtaacacttcaagtactatattgaatagatatggggagagtgggcatccttgttttgtccccgatttcggtgggatttcttcaagtctaatttaattcaatattggctgttggtttgcagtagtttgcttttattatgcttaagtatgggccttgaattacttctttctccaatacttttaccatgaaggggtgttgtattttgtcaaatcctttttctgcatctaaagacatgatcatgtgatttttttcctttgactttgtttatgtagtagattacattaatggattttcatatattaaaccaaccttccatccttgggatgaagcctacttgattgtgtgaatgatggttttgctgtgtccttagatttggtttgcaagaattttattgagtatttttgcattgatattcataagcgagattggtttgaatttctctttttttggttgggtccttgtgttgtttaggtatcagaataattgtggcttcatagactgagttagatagtgttccttctgtttctattttatggagtagtttgaggaaaaatggtatcaggtcttctttgaaggtctggtagaattttgcactaaatctatctggccctgggctttttttggttgggagagttttaatgacttcttctatttccttgtgtgatatgggcctgattagatagtttacctgctcttgacctaacgttggcatatgacatctgtctagaaaaccttccattgcatctagattttccaattttgttgagtataaacttttatagtaggatctgattttttttaatttcctccgtttctgttgttatgtctcccttttcatttctgattttattaatttggatatacactcttggccctcattaatgagttaatttgtttagggggtttaatctatcttgttgattcttttaaagaaccagcttggttttgctgattctttgtattgttttctttgtttctatttggttaatttcagcattgattttgactatttcctgccttctactcctcttcttcggtaaatttgcttctttttgttctagagcacttaggtatgctgttaagttgtcagtgtaagatctctccaaattctttaccagggcacttagtactatgaactttcctcttagcactgctttcattgtgccccataagtttgggtatgatatgccaacattttcattaaattttagggagtctttaatttctttattttttccctgaccaaggtatcatctagtaaagagttgttcagtttacccatgtatgtgggctttctatagtttttgctgttattgaagaccagccttagtccgtggtgatctgataagatgcatggtattatttcagtcttcttgtatctgttgagggttgttttgtgatcaattatatggctgattttggagaaggtaccatgaggtgctgagaacaaaggatattcttttgttttaggatgaaatgttctgtagatatttgttaaatccatttggttcataacctctcttagtttcactgtgttaatgtttagtttatgtttcaatgacttgtccattggtgagagtggggttttgaaatctcccactattattgtgtggggttcaatgaatattttgagcttttcagtaaagtttcttttatgaatttgggtgctcttgcatttcgtgcatagatgttcagaattgagactttctcttggaggattttccccttgatgaatatgaagtgtccttcttcataacacttgataacttttggttgaaattgtattttattggatattaggatggcaactcctgcttgtttccttggaccatttgcttggaaggcctaagcctgctagcttatgtcttttcatatatgagttgagtccattaatatttagagatattaaagagggatgactgttggttcctggtatgtttgtttttgtcggtggctttatgtgcttgtggctctctgcttttgctttgttgtgagatgcttaatatcttcttctttctttggtgcacatgtcttccttgtgttggaattttccttccaggatcctttgtagggttgtattggtagatagatactgtttgagttcagtttagtcctggaatattttggtttatctatctatgttgattgagagttttgctgggtagagtagtctgggctggtatttgtgttcttttagagtctgcatgacctctgagtcttctggcttttatagtctcttttgagaagtctggtgcagttctgataggtctacctttgtattttacttggccttttttcattttagacttttatatttcaatataagccatattaataatcataatcatgtccagctttctcctcttcagctccatccatgtccttgcctgttaatgccagttttatttactcacatgaatggataagatgggaactgtacccaagctgtgcaaatacatggctttaccattggactgagcgtgaggtccccaattgaggacttaaagaaaggactgaaggagctgaaggggtttgcaaccccataggaagaacaacaatatcaaccaagcagacctccccaccccagagatcccaggaactaaaccaccaactaaagagtacacatggaggaaacatggctccagccacatttgtagcagaggatggccttgttgggcatcaatgggaggagaggcccttggtcctttgaaggctttatgccccagtatacaagggcgggaaggcaggagtgggtgggcggggaacaccctcatagaagcaggggtgagggaatgggataggggcttgggggcagggaaaccgggaaatttgaaatgtaaagaaaacatccaatttaagaaacaaaataaaccaaaacacccaaatacatggctgggactgagccaagagagtttctatccctaggcctaggcctgaaagaaagcttcagcctttgaatacaaacctaggctgcttagacttactgctgaataaatcccctctttctagctctttctgaactttggctggttgaatcaacttagctattgtggttcaaacttctctctaagctgactgactcaatttgacttcttttgacttgtgactgaattggtctgctaggaaagactgcctctaagctccagactcaaccactctaaactcagctgaacctaaccaaactgaactcccctttctccctgtcactgctctttaagttgcctgtagttcctgtctttagagttaggtgtatcctatctctggcctattgtgtcagatctttctctgatttgttacttttctgctcctcaggtagacattattgtttgagatttaaggtgtgtagtaaaggcctgtctttattccagccagagggattaaaggtttgtattccagccagaagaataaaagatatatgtctgcattccaaatggatatgtgatccttgccacagcagccatgttggtactttaaaattactctagacttgccagtatacctatctcaaattcatgttttcttctgtaattcttattcttcctcccacacttacttcctggccctctactggtttcaattagttcttaactgtatgcacatgactttcaggctggccacttaagcacagacaacctattagagaagttgtccctgaagaaaactgactctccttcctgtggtagccatagacttcctagcatgcttgtagcttccccaagtaggtcttgggcaatgtgagccattccccaatccatgctggaccattgactgatgtaatcctgtatggtcttagtaggcaattatagatactaagagttccagaagagaatatattgcatcagtcctcttggctctctggctcttgaaattcaccagcctcctctttcagtgttccctaagccttgggtgtaggagttgtgttatagatttcatttgagggaggacattccacatccacttattctctgcacttttcccaattgtaagtctctgtcattgcctctgtctactgaaaaaacaggtttcttagatatgggttgtgagctgcaccaaatgtattgaaaaccattttctttttgtcaagtgcactgttgatacattttgttttcataccactgtatacctaaaactccatggtgggtctgcaatggagcatggagaatttgcttcttctcatatatccttggagatatggcctgttattaatatgatataacaaacacgtgctactgacactgttctcataccacttgttctcagtctttgtaaaacccttctttattctatatatgtttctatggaagtgaggtacttattcaactgaaatttgtctagctctccttctcttggctaattgtttaagactgtttctaagcttaatggcactggactgtaatccaggatacctctgagtaagtacctgagttcaaggcctgcctggacaatttagtgacactgtctaataacaaaagtaaataaagggtggcatatagcttatgtgtgggaccctaaattgagttcccaatggagcaaatgaacaattgacaacaaaagcccagggcttctgctgataattgtagatttagttcaatgaagatgtttctaagaaaaaatattttctctaacaagcctgtgtttgtgcagtgaatacttaaatgaattagatattttatagcagttcttgtgctagagaaagtgcgtttatcagataaaggcaggtatagtatttaaatgaatgggatactaccttaaaattgacaactttgttttatgttttctgattaactcttactttttgaattcctgacttacttgccccaatcatatttttaattatttaatttttacataaatcttggtaagattatttattatatgatactggttagattgactcaggcatatgaaacatggtgactttttatgtgctcatagtctgtttatgttttctaattaattaagtgataatagttgtcttcttttcagttctgtaaatgtttattgagttcttgttagacactatttaaagaatttcagagaagataaaaatgaatacattcgacaggcgtatctactgaagcaatccacaattgataaaaatagcaatataaaaataatagttaatgagcagccagcttgctgtgtgctagtcatagtattaaagaggataatgtttgtcatgattcaatctggcagcagccagccgactcctacatatatgtttttacttctttacttaatcacctaggttttgttctattgtaatctcttttaagaaacttcttttccaatcctgtgaaaatagcagttcatgttgctcttagcattgataccttgagattttcttgactgtcataaatctaataatttgcttgcttgtttgttatttggaataatattactggtaaacttagaattgtaggagttaagggttgccaaaggggaaagtttaaattagtatattatagtatattatatgcaacttcttcgagccctagatgtcttatttgcattatagacatagacataagtggttcatacattggtcagtttgttcattcttttatttagtaaatgtattgatcatctagcatctagcagatactatttattgtgtgtgaaaaagacagtggtcctatcctattctaataagggagagagatagtaaataaaacttactcttacagcatatcacctaatagccaaattaattttccctaaagcctttttctggaccactttgctgtttaatccttaacccccatacagttttgtccccatcatcctctgttcatataatcaattatttttatcttcttcctcgatctgatctgcagtgtctcctaacacttgctgctgcagagtaattgtgttcccgaatgaagtgacattgttgttttccttttcttgactccatttgaatgtcagtgcagcctagacttgggtatcttttattttgctggtgtcatttattgttccaatctttgtttctgttcgcaagactgttgcatatgaatattaaagatccagccaattccaatcctaagagttttataaaagggggtcttcattgtagatatactggcttataggattagcttatgtttatgtaatgcatttccattagcaaaactgcttttgaaacttgaaatgactgagtctctgtggagattattagtaaatatgacatcaaggtcatcatagagatttcatactaaattcagaaagatcgctttccaaggacataattttaattggagaattgcttgtggctaaattttcttattgtgagacgtagcatattgttttcaaaagcccctcagcattctgcttgctttagctccattctcagctttgagtctatattattaatatgcttgtggttagaaaggaatctaagtgtctttctcaggtgctttggagatggctccagcaggtaagagtacttgatatgcaagcaggaagacccagtcaaatctctggcactacataaaaaagctagctatggccattgactactgtatccctcaacactgtgcaggctggagacaaggggctaaactttctggccatcatcctagctctaaattcaatgagagactctctcaaggaaataagtcagaaggtgataagagtaggacatctgaggttctctgatctctgcacacatgtgtgtacatagcacacatatattacaaccaaaaatttcatacagataaataaatagaatagagtagaatttctaaaagaaacaaagcaactatttgtatgtatccattcctgtcccagggcttaggcaggtttgcagtgaaactccaccaaacgtgttacctttgctgcttatgtttttccactcgtttaaattttcctttcttttaattatctgtgattatccaaacattttcatccccatttcccatttcaatgatatttcaatcttaccttatatactagttaacttgctgtcacttttccatctgtcatatattataaatattcaccaattctgcttaaacattaatacacagggcataaaggatggttcagttggtaaagtcctcgatgtataagtggagggaccagagtttgttctatagaataaatgtaaaaatccagatgtggcataaccttgtaattgcagtgttgggatgcaaaggcaagaatgtcattggtaccttgctggccagccatgctatactaattggtgagctttaggtcaataaggagaccttgtctcagagaagaatggcattagagtcatcatagagaattcaaagaaaatttagaagggtcgtttttcaaggacataattttaattagagaatggcttgtggctaaattttcttattatggaacatagcatattgttttcaaaagcccctcagcatcctgcacagaaatggtggcatttctgaggatgatagcaaaggttgttctcttgcctacagacagatgtgttcatatgtgcacatatgaagacacacctgcacacacatccaaatattaagttctaaaactcattgttaatatgattgaaggaagtctctattgatactctgcccctgtccttccagatgtgtgcacacattgcatcgaatgtggtatgtttagctgaggatctgtactggatgttttcagttcttgtaatgattatgtttccttatttttttaaaactggaactgttagaattcatgaagtcacctacattcttctcaaagctaatcatgaagatgttaatgtaaatgcaaatggtttcttgaatgactcctaattttaaatgttttttttttgtttgtagataactgaatggagtgtttgaattgcgctttgcgactctgaaggctgaaggtaacggccagtgacggtttccatgggttttgtcttcgtggacatgctttattattttcaaggccatggatttactactgaaactttttcttgattgccctttaacaatctcttcctcaaaataatatataattataagtaaaacaaaaaccccttgtcattttataatatttagttctacttgttgatgttatactttcttctacatagaaatgttttatgcttctcatttttattagtttgaattcttcttattgtaagccttgccctttctctaagtaggcatattgactcaaaattggaaagtaagaatatatttgtgctcaggaatagctttacaacttatgataggagagagataaaagtgctttctgtggaaacatccagactgttcagatgacgtttaatagcttcagatacacaagtccagaattgcaggcaagaggttaacaatagacttgtgttgctgcattgtgtataaagagctcataggacttgagagagccttcttagacaagagggggctgtaattactttgcttcttacatgcatggttagatcttccagagagaataacatgctagggtaatttattatagaggagtaaatcacagattacataggagggggttgggatagtgtgatccaaccatcagttggtgaatacacacacttaagcatgtgtgatagcttgtttttaatttctttacaccagtgcacacctcaaacgttccgtttagcagtgggatatgcaaattgttccaaatgcagcagcagtactttcacctgaatgtcaaaactgtcagacagctttaaatcaaatctttataacattttaaaaaccaaccagccccaagattgaggcaccaaactctgaaaaaaacttgtctcccatacttccaaacagctcctgtatgtcaacatagtaatgtcagagttctaattcacctgctttctaattttaaccttttaaggattttattttatttggcttaattacgatattttctacaaattaatgataaatgccttgattaataaaaccaaatgtcagagaaaatgacaacttgatgaaaaattaatactaggcaatattttaaggaacagaggcactaaagatgtattcttgagactggtatttcatcgtctctttcttgaaggtaggtaaccagaattttctttgtaggtttccactactacatgaataggtgcattaataatatgatttcatctgtttttaatgttagttattataaatagaagtatactcctaagttatctcttttattactgcatcattcatttttattttacagaaacaaaataatgcatatagtatgatagtgatagaaataaaattagcatattgagaatctagctagttgtgtgtgtttgtgtgtgcatatgttgtctgtctgtctgtctgtctgtttcagaaagtctcatggtataaaatttattatttttcacatttgtttagttatgaccattttgttcagtgaatcaccagttcagctaaactggctggctagagagctgcaggccccatctgtccctgtctgcctagcacttgggctacagtgcatgcgtccatgcctaccttacatggctgcagggaatctgtgctctgctacttatgattgcataacaaacattttaccagctaagccatttctcccgaacacagggatttggtttttaaagcattttctcaaagtttgtttttttatagaacttaataaatgtaaatggctctgacttgctttttctttataaactgcttagtagcttaaagctactagaatggtcaatatgattattcttctttagggatagtcataggattgaaagacaaaaatgtgccacgtaatttttatttgaaagtttttgctttatttacaaaattttcatgctagtacatattgcgtgctgaatatattacccacagctttcaaactgtcctgccttctcacttcttacctgctccattggtcccctctgtctccctaggcagatgtatgctcactttgtcatatatacatccttgatgttatgtttctctgtaaactacatgtgaaagaaggaatataagacaataagaaatacattgtctgagactgactttaaaaaaaatgtatttattttatttataggaatacaggatccttttacagatggttgtgagccaccatgtggttgctgggaattgaactcaggacctctggaagagcagtcagtgctcttaacccctgagccatctctccagccccctgagacagacttatttcacttaatattaccatctccatttgctttcatgttccaacaaacatcaacgttttgtactgtttccatgtatttttctattttcataaatttaggattttattttgaccacttaaatatttgttaagtgttaagtagaaatggcattatgcagcattaatgcctgtgctgtaattttatattgacacttcacaaataaaactgcaaaacaaataaaggagtgcacagcaccgctcctgtgttgtgtttgattgattgagtgggatacaaagaaccacgtagtgcagtgttggtgaaacgggctcactttggccatctgttcatggagagacattctggtcacacctatcaacagaaatttttgccagctaaagttagaatcacttctatgtacaatagagtctgtactttttttattctgatgttttaagcatcttgttctacatattagggtaagtagaggtaagcgctagttggcaatttgcaaacatggtgtatactagtcctaagggaaaatattcatcagtgcaggtttcctggaatatctgcatttggaaatggattgtttgaatcttccctttgttggctcctgattttaatgtttttatgtagagcttgattccaggcatcttgtctgtactgccaaagctgtttgacagtagaggccaccaatgatactgccctcagtgttacatcctgccatgtctaacagctctgtcacctagttagtcacttctgtgtaactctctgaaccatctactttcccaaggaggtgtttgttccattgcagcacaaggctcctattaagtgtatctctatacctgcatttatctgtaagcaaaattgtaatttcatatatcattaactaacagatgccccaattctttgacagttcttaatttatatattaagaatgtgtcttttctatatgctatttttctttagtcagtttatttctgcataagaaacagctctctgtgtttcttagttataggatttgataaggaattatgaaatacttcacaatgtgtatggttgtgtttttaagtgagatcctagctgtcttagttttttactataagaaatggttatcttcccccacagtatctgtaaacaagtgagcaaaactgcaattcagaataagttctaaaagtctttccttggtgtcacatatgagcttagaggggaaggctgactggctgagcctacataaacttaaacttagtcagtgagttgggtcatgatgctataaacctgatgcttgaatgaacgcaaaacaattagctgaaaacttgtgaacatcctgaaccatatggaaaatttaaaggagttgttctcatctaaataaaatatgtacaaaaagtacaaaaaatatgccacaaataaatcttacaatgggccaacactatataaattctcagttttgaaatctcacaaggttctcttataaatgtctttttagcaccctttgaaatgatattttctatcttagcctatattgtattctgtaaaatcagattatttagaacttttgtatgaaaagataaatatggcttatgaagttgtatttttataggtactagttagaataatcaggctttagaagttggggccacccatcttatttgtctacttcagaaacttctttttataaactgaatgaaatatgttcagtaagtacaattttaacttagtctttgattttggttttgagacagtcttattggtttccatccttctttataccgtgagtgctgggattatagtcacaggccattccagagccttgagtcatactgttaggtaaggaaagaacagatagcaagaaaacacatgccattccccctccccaaattctgcattcatcttcttcccttagctatctaacatctttcaaaatgtgctggtctctttttggattcctttagtgttgacaaggtgttttttcagtcctctaatgaagtgggaaataaattagcatgcttctggaggtatttagattacttactgtagtaatgctcaacatgtctttgtaatagtcttcaactcctacccacaactaattagtgactctcagaaggagagaggaccttgctcgtgcagtagctctatatttactagtgatcaaaggggtgttactaatatacttgtcagcagtagaaaagagttaaggaaataaagggccagatggttgcgcccagaacctatcaagagcccagtatgtgtgggctggtccagcagaatgacaggaacattttccaggccaagaggaactacagttaagcttttactaatatcaacaagaatgtttgtcaaatgtgttttttatggtactgtgatttgcatctgcagatctcattggtacgagttactatgagagccacatactccttgcatcaaattcaagcagattcacaggactcagcaaagtgccatgccatgagtcatattagcatacaaagtaaggtaattaccctggaaacatttttataggttcagaaattactattttttcttaaatcttacaaaatttttctatattctcttttcgtttcacccaccccccctttccttcccagctgggctaatctctagatccttctgtttgtacctgctcagcacttggcaattacactcagaaggaaaggatctgcgcagttaaagatatttttcatactctattttaggtggatatttgtttcttccaacagattgtgtgactcgtacctgataatatagtgcctgccaagtggtgctagttaaggaagcagtgaccatgccttagtgtttgtgctgagtcttcacactgagtaaactggagatcaggatcagcatagccctcctgtgtgtgtctctatgctcatcctgagtctatgcattgtacataccactttatgtcaagtcaccattttatcttgtcattatatcatgttcatattataaatacttctgaaaacccctaaacctcctgagttgcgacgataggtattcagatcagtgctgttgagtaggtaagataaaataaaataaaatatggattttgaggcattttcttcttaaagtcacacccacaatgtgtgagtagattagctaactttaggcccctccccttctttccctccctcttttctttccattctttcaacatttcctgagtgttagatccatgtcagacattttacagatgttaaatatactattgaacaaaagagccataaggacattatcatctaaaagggtaatatactaagacataaatagcaattacaaatatagatatttaatgaaatcattctttctgcttgtctctactctgtcatggttttagaaagtgaacgtgcagtgtattattcctgtagcctgcattttaaagagtggattacatctagattgaaattacaggaaaaccatattcttttcaacttacataagggtgcaggtgtctttggtgcaaatgtagatgaagcagtattttactccaggaggagctataagaaaaagatgttttgctgggcagtagtggtgcacacctttaatctcagtacttaggaggcagaggtagacagatctctgagttgaagggcagcttgatctacagagtgagttcaaggacagtcttgactatacagaggatccttgtctcaaaagccagaaactaaacatcaaaaactacataaaaagaaaacaaacaaagcaaaaaacccaccaccaacaaaacaaacaaacaaacaaacaaacagaaaagagaggaaaggaaaagaagagagagagaaagatagaaagaaaggaaaggaaaggaaaaggaaaggaaaggaaaggaaaggaaaggaaaggaaaggaaagaaaagaaaagaaaagaaaagaaaagaaaagaaaagaaaagaaaagaaaaaagaaatcagagctgtttctattatctgatacaaacaaccttcatgggtaatttcaatcctcagagcttgtaaaggaaattctagatttttaaaaaaattactaaaagttacttctttcaaataacttttgttagtggcatattatttacctttgagtcaggttttggcaatggtaaggaaagactagggaatggatgtgtctgtagttttctctcatcagtcctgtgcctgtaacagttttgtgttgtgatcagagtcttcattatgcttcctattggtcgtgcacaccacttggccctgcagcctgcattctcattcaaagccattccaaagctggacttcagccttgttcagtaaaaagaggccatttcccccatcagctgtccacttggacatacattctttatcctcttaaagtgttttgtatgcatccagtgtttactagatggatttgtcaaattgctcatagataatcagttttttaaagttataatttgagctgtgacctctcaaactctgaattataaggtttgaccctttgattcacattttgacataacagccattaattatagtttttaaaggacatttatttcagttataatttgtgctatgaaaacactttaagtgtttttcctttaactttcaggaataactgcccaaatataaatgcatatgtttcaacagatctgtaactatatgtagtgtgtatattttattataatgagtcactgaagtaaacatgaatattttgatgatgtatatttgtgtgttttataccaattcattgtgatatattccccaggatagttttgtgttgtcatccattaattatcaatgggatcatcttcattttatataattctgctgtgattaactatgaccatcaagataaaaataaacattcaaacaaaacaaaacaaaaccttatcagtgaaatctaggtatgtcattaaagaaactttgaatattctacagaccatttgaagtagtatggtataggcaaatgtaagtgtttaggtggtttttacaaatatccatggctgagatactgagagagaaggacatggcagagctatcagtgtaggtgagcttgggaacatgtaggcttgcaaacaccaatagcatctatatttttaatggaggaattaaataatagttcattttaattggataaaaagacatttatatagctaacaattataacataattctctgttactagttaattagtactatttcaaatatttgtttttaaatcagggtttctcgttttgtactaaacatactttagagaaatgaatactttctgaatctgaatagtcttccaaaagacacatagtcaacagtttgtagtttaaatatatctgaaatagttagcttggttttgtgtaaattattcactgctgttgtgttcatgtctaccatgaggtcttatgggaagtgtctggtctctcatgtactggatagtgtgcctcataaaagaccctctgtgcttgactatggtactccaagatggattgtttcttaacattatagaaatatgttcattttaattccaagaatatgttactgtcttagttgactctagagattcaggcgacttcttccattaacagactgacatgatttgagagtgacttgttgacagctatgtgggaacgtttgtttatttagtatgtgtattttgtacttcctatctggaaatagcattatacttagagtttaaattgagttttagctttggttcaactgcttcttgttaccagggtaagtgacttacttctctgcactaatctcaaaggaaaatgaagaacgagatctctgttatagttaggattagagatattattaataaatatattgaatttaatgcatgacacatagaatgctaccagtaactaataatgacttaaattggaagactgttcccagatttttcaatcagtaaggcatttccttttaataatttctattttctgttacatttacttcactcttcactttttatctccgtgtttctttttcctgtgactttccattttcttcatgtttccgtttacacatggagagctcctctcacgcagagagcatttgaaataagagagttattctccaacacacgtgagagcactgcagcaaaggagtgattgataatccacaaagaggaggatattttatcataggatgtgtgtttattattttttttctgaagtacaaaaaaaaaaaaaacccagaacttatcagtagaaagtagacttctctgattaagtaaatgatttagagtacagtatttacctctaaaacctagtagttggtgggtttttcccctgcttagtttctaaaagagaaagtaacagcaatgagaatagaggcaacccttaaaacagtagatttatataaggattaatatccaatgagcataaggcacttaatgtacgtgaacaatgggaacaggaactgcgtacttttttcttgggagcgaacagaaatagccaagaaataaatgaaagaatgtcaaacatcaataataatcctaaaaacaaattaaaatcaagactgtagtaagctaggtttcataccttaaaatgactgtaattaaaaaggcaaagataactgctgctgacaatgtacggacagagaattctttgtacttggttggtagggatacagattagtaactatgaaaaacattttgcatgctactcaaaaattactaatagaattgtcatatcacccagaaatgctactaataggtataattcaggagcatgcctgaattatacctattacatttctccacagttccttccagtgcaataaccaagatacagaaactactgaggcggtcatcagtagatgacactggagtactcacattcagctttagatgtgatgtatgcatgtatgtgtgtatagatgtgtgtatgtattgtctatctaaaatggaaacattatttaactcattatttataatttttaaacattaaaactcagggacattatacttgaaataacgtaggtgaaataatgtcggtacacaaaggtaatcttcactgtcttacttgtatgtggagtcttaaagagctgcatacagaggcatagttaagtgatggttgccagacttcacatgatggtcaacataatggtcaagaacatataggtaggaggactaagttaataggctctattatacatcatggtgactgtaagtaatgtatttcaaattttaacattgttaatgagtttaagtcctttcataaaattgctgaatatgtgaagtaatttatatattcataaatgtttggacattatgttatatatcatacatacacacacctatacacacacacccacgtattcacttttaacttgttatcaaataagttcaaatttagtagattaaagcaaaaagtaatatcaaggtatattcaggtagaatttccaaaaaagcaaatgatttctgaaatgaattttaaacaaatttttgtttcagcaaacacatgtagtctttgtatgtttccactaactgcatgggatcggacttcctttcatctgaggggcttcctttcatatgacctccatcactgttatctatttaggaagtcttatcttcatggtacaaagcatttatctttttacctgaataaaaggagttctagtacaagatattggaaaacttacgattttaacatagttgttaacagtgggcacagggaaattcagtataattttcagatttaagataccttgttccttctttttaagataacagtttactctttcttatttctcacattacatgaaggataatgttgaaattgtaatttggactcaatctccgtcttgagttcctaacttacagatttctttttccttttgccatattctcttctcttggcatatagttctctctgtcattttacagcttgatgtctttcaaacacagacttttccagtatcttttccttatcattcattgcatctggcatggtcttcacatgaccagagaacaaaactccatttcattagtggagtccttaattatcctctgatgtagagggactatttcagtactggttgagggaaggggttgtcttttccatcaatgtccctgacacataaaagaagccagtaatgtgtttgcagactagagtgaacagagttagagaaacggaatttccaactctacacatgataaaaaaatctttggaaaagaggttgcttcaacacatggttgaaatacatggtatttcctttgactttctacttgatttcacttttgtttgagtgtctgctcagatttgtctcttcagtaatcaaaccaaagttttaccacctactctgcaatgaatctggaggtgatttttaaggcaaaaatgtgtgtgggccaagaaaaagaattaaaatattgccttaatcttagcatttacgtgacattgggcgagtgacacaggacatttagaaaaagttggtgccctttagttttattgtacataccgctgatggctgttctaagcttgaagcactttttatatgtatagcatttctcagaggctggaatttaggcaataattagcctcgtcagtgaatctgtttggaaagcataaactgacattctcttccaaaagaaagatgtggtggttttgagattgcagtctccggtttaatggtgtctcggctgcaacagatgccttccttgctttctcctccagaagctgctgcagagttttaagtgcggcgcatatagcacacacaggcactgttaacgaatcagaatgaggccaggggaaagctcagctaggatgcacacacctaaatgcagttagtaaacagagacactaactctcattaagcataattaaacctaatattgactgtaaactgttacttaccttaaacttctctgtagagagagtgaaaagggattaacctagcagattgggacattaattactacctatttcacattaaagttaccatcaagaagagctatattcataaataaaacataggagggattgagagatggaaaatatgtaaattcattttataaaaaggaaagaaatcctatattaaaaaatagaaagagggctgtgagtgatgccagtttcagcaaaagggaccgctagctaattactacaacaaatagactcaaataatcacagaggtgtatctctgcctctgactgacaggacctgcttcctaggagacttagctcagctcagcatgagtcttttcatgtgctcctcctgccacttcttcaggacactgagggtttgaaagagtatgaagggacttgggagaaatgttatttcttccccctttgcagtcattaatagcagcttatttatgaaatttattataaagattgtagaaatgtttggtttctcatcaagaattttttttccctccccgagtcaaaacggtctggcaactggtctcctgctactatttaataatctccttcttgggtgcaatctaaagagaatgttgtgaagaatataaaaatgtcagctaaatttaagacccactgttaagttttatattgtgctgtagcctctagggggacagatttaaaagagaagaatttaaagagaaagcaaagtgtggacaataccgacgtctactagacttaggatatgttttttctgaatccatcagattgtttggactgctttctctggcctgttttccattttcattccactcagtgcattgcactggggatgggcattcgcattgcttcaccagggtgggtgctctgttctgtaacggattccccattccctttgggtttatggtactatccaaccatagcttagatttaacttgctgggctcctaagttttggagctgtcgtgctcctccttttctttcaaattctcataggcaagcaccagtgtaaaatagcagttgtgactgtgaaaaacagcctatgaattcagcctgaagcacgtagttttttaaaatggatcaagagttcaatttaaaataaaactcctaatttttttctagtgaatttaaagttagtttcccagggttatgtgtttaactaatgcaacaaaaataattaatggacaaaaaaagtctatccttcatttcacccattgaacaaaaccccagcgactgattgggtgacggaggatgaacaaaaccagtgagagtagaaagtacctctatcctctgctcctgtaacaatagtgacattacgaaataaccataacaatggcattcatattaatcagacatatttatacagaattagtgttggcttctgctctatattacctttagttttacatgaacttttattatctgtgcatatcaaaagagacatggtgaatgaacaaagaggccctgttatgagacgagtattatttgacattttgggaagctcttattatagggtttcctcttacgtgagaacaacgggaaggttgtcatagttgctctattagagacactctggaattctaaaacagaaatggagcccatttttttccttgaagaaaattaatcaattagaagaattggaatgatccaagacttctcatggaggttggctgccctgacctagtttgagcttgtgaaaccctgacctttcacggaatttcttggtatcatggtttttcctttgtgttacaaagcttgtgagttagtagttctcttattttttcccaaagattaaatatatttctagacttaatggaaatatttaattataacaaaatgcagacatttttacaaagcctttgattcccctgcaaaccagatgcatttgttttatttgtgcatttactgtgctaaaagagaacagttccaagtgagttcttttcaggccatcttccttggcgtctcacaattctgactgcaaattatgttaaaaagaaaaattcaacctggatattattgacctttatattaaaaccactgagcatatattttcactttgactggttaccacaggtttattttgtctgcagcctgggttaagattttaagtccaaagaataaaggtaacactgttgaaaggaaactagaggagtcactacggctgaaaacttctgctgcccgtagagctgcccagagattcttcaagtggaggtagtagagatcattgctacccactgtcatggatttaatgctaacctcccaccaatgcaacagtttgaccagtaggtaatttagctgcttttaaccatagaattacaataaggtatttataattattaggatttattttttgctccctttctgttttcctaagttttatgctaacagacactgagtttgatggtgaagtaaaaacaaacagttacttatccctgcaaaaatgtctgccaggattggcatttaagcacataaaagcaacctagatttccaaatatcacacacacacacacacacacacacacacacacacacacacacacacacacagagagagagagagagagagagagagacactaaaatataaataaagaataaaacatgttaaaactcttaataagccactcagctagaagagtagttggaaaaacagatctcaccgataatttttttgatatttttattggatattttatttatttacatttcaaatgttacccctttcccggttttccctctggaaaacccctaacctatatgccctcccctgcttctattaaggtgctcccccacccacctacccactcctgcctccctgccctgatattctcctacactggtgcatcaagccttcccaggacaagggtctctcctcccattgatgtccaacaaggccatcctctgctccatatgtggctggtcactctatggttggtggtttagtccctgggagctttaggggagtctggttggttggtatagttgttcttcctatggcgttgcaaacccctttagctcctttagtcctttctctagctcctccattggggacccagtgcttagtccagtggttggctgtgagcatccaccactgtatttgtcaggctctggcagagcctctcaggagatagctatattaggcttctgtcaggatgcacttcttggcatctgcaatagtgtctgggcttggtgactgtacatgggatggattgggtggggcagtctctggatggactttctttcagtctctgcttcacactttgtctccatatttgctccagtgggtattttgttcccccttctaagaaggtacaaaagcatctacactttggtcttccttcttgagcttcatgtggtctgtgaattatatctgggctaatatccaattatcaatgagtgcatatcatatatcttctttgtgactggattatctcactcgggatggtattttctagttccatctttttaactaagaatttcatgaagtcattgtttttaatagctgagtagtagtccattgtgtaaatgtaccacattttttgtattcattcctctgttgaatgacatctgggttgtttccaactcctggctattataaatgaggctgctatgaacatagtagagcatgtgtccttgttatatgctggagcctcttttgggtatatgcccaggagtggtagagctcggtcctcaggtaatactatgtccaatattctgaggaactgccaaactgatttccagagtggtttgtaccagcttgcagtggaggagtgttcctctctttccacatcctcactagcatctgctgtcacctgggtttttgatcttagccattcggactggtgtttggtagaatctcagggtcatgttgacttgcatttccctgaggactgaggatgttgaacatttctttaggtgtttcatggtcattcagtagtcctcagcttagaattctttgtttagctctgtattccctttttaaaatagggttattggttctctggagtctaatttcttgatttctatgtatatattgggtattagccctttattggatataggattggtaaagatcttttcccaatctgttggttgtcattttgtcctgttgatagtgtcctttggattacagaagtttttcaattttcaaatccatttgtcgtttcttgattttagagcataaggtattggttttctgttcaagaacacttcccctgtgcccatgtgtttgaggctcttctttactttttcttctgttagttttagtgtctctgattttatgtcgaagtccttgatccactttaacctgagctttgtacaaggagataagaatagatcaatttgcattcttctacatgctgactgccagttgaaccagcaccatttgttgaaaatgctgtcttttttctactagatggatgtagctccttagtcggggatcaagtgaccatagatgtgtgggttcatttctggatcttcaattatgtttcattgctctccctgactgtctctgttctaataccatacagtttttaatcacctttgcttggtaatacagcttgaggtctgggatggtgattcacatgagatatctttccatcttctaaaatcttcttcagtttttttcttcagagacgtgaagttcttgacatacagatctttcacttgcttggttagagtcacaataaggtattttatattatttgtgactattttaaagggtatcatttccctaatttctttctcagcctctttatcctctgagtagaggaaggctactgatttgtttgagttaagagagtgggcagccttgtctaatccctgattttagtggggttccttcaagtttctctccatttactttgatgttggctactggtttgctgtatattgcttttactatgtttaggtatgggccttgaattcctgatctttccaagacttttatcatgaaggggtgttggattttgtcaagtgctttctcagcatctaatgaaatgatgatgtgttttttcctttgagtttgtttatatagtggattacattgatggatttccatatactgaatcatccctgcatccctgggatgaagcctacttgatcatgatggataatcattttgatgtgttcttgaatttagttggcaagaattttattgagtacttttgcattagtgttcataagggaaattggtctgaagttctcattctttgttgggtccttatgtggtttaggtataagtataattgtggcttcataaaacgaattgggtagtgttccttctatttctattctgtggaatagtttgaagagtattggtattaggccttctttgaaggtctgatagaattctgcactaaacccatctggtcctgggcttttttttggttgtgagattttaatgtctgctgctatttctttaggggttatgagaatatttagatggtttatctgatcctgattgaactccggtacttggtatctgtctagaaaattgtccatttcatccatatttttgagttttgttgagtaaaggcttttgtagtaggatctgatgattttttaaaaaaattcctcactttctgttgttatctctcccttttcatttctgattttgttaatttggaaactgtctctgtgcaatatttaaattgaaatttttaaaaacttgtttaattttgaagaaaatatatttcctagtatggtttctgttttaattggatattaagcaggcaaaataatttttctagtggctatactgtacatggacacttacgctcgacttaaacatatatgtaagatgctcctgatttggaggctgagtttccttgccttacatttctgtgtctttcacttggaagacatcaaggcaacaggcatctgagaggagacttcatttcttctacctcttcattgtcattgctccttagatggcttacagctaaagtacagtcaggtcttcagagctgcttaaaatttctttaagtttttctcgtccccgaatccagattttgaattgttagatctgatatgttgcatttatattttgtatccttcttagggcttctgaattcatattggttttagtagattcttggtaaatgtagacaagctgaaatcattgaggaatatctgcacatttaaaaatagtttagtgagcttcttatatcagaatgggacagtttttaactttcagggaaattaataaatgtacctgcatcatgcaaatgactattttcccttagtatctactctcaactaatttaagggtactcatattgtatgtttaatgccatgttttcataacatatccatcctttaatttacttaaaactacttatttgtgtttattatttgtgtatacatgcacccacacagacataaaaatattgagttgtcatgggctttggtcatcttaataaaggactgaaagaagatactatggcaatgtgaattttctgtgattgattaaggagctaattataagataacttaatcatggagattgaaggtagtaaataggtggagtgggtggaaatggttgcaatgggaaggaagattctagaataatgcatacacatgaactgtgagagaaatgatgtaagaatgtctagattttccagaagtgttatatatatgcagttcattattaacctgaatgcatatatgagaagggaagaataaaagataataatcatatgctgttgtgttttattcagttgggtttgttgtgtttttattcactagagaatgaatttaagattgtacaatcagtactttggagatatgatctgtcttccctaatggccaaataggtgtaagaggcagtgacagattcatgaccaactcatcttcttaacaatagtgagactactgagctctacggaaatagaaagtgttggcctactgccctctatatctgtcatttttcatatgttctaatttcttcaaagaggtatttataccttctgtttctgttttctgaattatgccttaattcatctctgctatatcaaggacctctctcaggcccccaaactatcattcctttgctttcattgaacctttggttgattaacaaatctaaatgctttcttccattattttgtcaaatctttttctgattcaccactttgtcttcccctcaagtgactatcactttcaaacatgactgattccttctaaaaactaaccttaactttattgtgagggattaaaaaatgtgtactaagtgaatgtctatattccagtcagatcatattgtaatccagagcatgtctgtattctgggcagataatatatatctagaatgtctttagacatttagcagccatgttgccagattaaaattcctcaatataagtcttttaaaatttcctgtagatgtctaatttctaaaaatgttgcctctcagcactcatctcagaagcttccatttgcagatcaacacagagacgggctactggccaaaattcagagaatagagactaaaaaatgctcatccctaaggggaacttatataccttcatcctaccataaaggagcttccatgccacctcgcaatcctccagtctccacccaaagactggaatcattacaaatgtgggacacaaaagtgtttaagagccagggcagtggacagctacaaggaaaccatgtcttttgaacatagcagggagctgcatttatgatctcataaaagttgtgacagtatgcacagaatccatgaaggcccatgacactctaaaatctcaacatggagaggttagcttggcatacagtcctaccctagtgtgagcaattggtaatggttagcttctggaagaatgacaaacttgtttctgagtgtagtccctggttaaattgaccatgttccagtggaagaccacacacctagaaatatttggacagcacaagccgatttgaaggatttaaacaatgtataagaatagtattaaaagttgtgtgagtagggatgtatgggtagattgggggttgtggtatggtgagtatgagcaaaacacctagtaaaaaaactcccgaagaagtaatgaaagttacacagttacacatacaaatatattgtctgtctgtctgtctgtctgtctgtctgtctgtctgtctgtcagtcagtctgtctgtctttatatgatgtttttagggtttatatacatatgaatttatctatcatgccccaaatctctaactttgagaaaggcctatgataatttacctacttttgggtttttttttttgttttgtttttgttttgttttgttttttgagacagggtttctctgtatagccctggctgtcctggaactcactttgtagaccaggctggcctcgaactcagaaatccacctgcctctgcctcctgagtgctgggattaaaggcgtgcgccaccatgcctagctaatttacctactcaatgtattttttgacacacattgataataccagtctaattaatacttgcattttattaaaatgtattaaatagtagtatcattcagtttggtattcatgagatacacaaagataaaatttgcatttctttataccatgctaccctaccctcctcatacccttcccaatattgaatttgtcttttcttaaaaatatatattctacatgtgaaacactacatctggtacttgtctttctgtttggcttgcttcacttaaaataatatactgtcattcatctggtttggcttcaaacacaaggcaggatttgatttctttcttatggcaaatgatacttcatttgcactagtacttctttaccttggtttggtctctgtggcattaactgatacctccctgaagcagatttttttataaataccttaatctacatgtgcccttttttaaaactcatattaaagtgtcatgcttcctcatgagtaatgacaacaccaattagcaatactctacccctagatgaagaactactggcaattaatagttgctgtgagaatcagtctttttcattgacgaactcccattaggttatataatcccaagagctaaaccctaagggcatatgagcaaaagtaaatgaaaatgtgtgtgtgtgtgtgtgtgtgtgtgtgtgtgnnnnnnnnnnnnnnnnnnnnnnnnnnnnnnnnnnnnnnnnnnnnnnnnnnnnnnnnnnnnnnnnnnnnnnnnnnnnnnnnnnnnnnnnnnnnnnnnnnnnnnnnnnnnnnnnnnnnnnnnnnnnnnnnnnnnnnnnnnnnnnnnnnnnnnnnnnnnnnnnnnnnnnnnnnnnnnnnnnnnnnnnnnnnnnnnnnnnnnnnnnnnnnnnnnnnnnnnnnnnnnnnnnnnnnnnnnnnnnnnnnnnnnnnnnnnnnnnnnnnnnnnnnnnnnnnnnnnnnnnnnnnnnnnnnnnnnnnnnnnnnnnnnnnnnnnnnnnnnnnnnnnnnnnnnnnnnnnnnnnnnnnnnnnnnnnnnnnnnnnnnnnnnnnnnnnnnnnnnnnctaaataatgaaaaaatataataataaacactgcaaatgaaataaataaataaataaataaataaataaataaataaataaatcgtttcatctctgagttgaaaaataaaagaaaaagtgaattaatgttaaaataatatatatatatagcttcttacctgccatattgtggatctgatttcataaaattctggttattatgtatagaatatgttcacttattaaaatacaactttctaattttagattattttcccagataaaagtcacctatgtttttatatagggaccagcagtgcctcagcactggacagcttcactttcccagtgctctctgcctctgctgctctaggcttttgcacagcattaacctttgctcctgccaaactctgctttcccctggtaacatttcactaactattctcagagttacctaaaatctattaacataagtggtgtcctggttcacaagtggccatatgccttttttataactacatgtttagcttatccaaatcctcactgatttcctatctactgtttctattatgtgaaagaatcattacctgtcatcaactttaatgatagattttgtgattttttttctatttgtacttcatgtgttttgaaactattgttaagggcatagtcatatagatatgttatttcatatttcccatttaaccctgaataagtataaaatgattcatatagtatcttttatatctggtggtagttcactttgaaatctgtttttgtcaaaagttaacacagcatatcatcttcaattagaattttcttggagcatttctgcttctagatctgtgacttctgccaattcaactgcccagagatctgtcaacaataacaaaagtattgtagctgaacaggacatataaagtcagtttctaaacataatctcttaaacgataggctgtaacagttgttcacaaacctttaagttgtattacgtattacaagtaatgtagtgaccatctgatgtatatggactatgtgagtactctgtgtcattttatataagactcttgagattctctgaattttagcttgtcagggtctagccttcttctgtctacaactaccttccaggggtgtctgtcatgttgaggatcttacaggttgggtttaacaatctggcttataattgttctcttatgtcaggaccctagagtaggtttgttttaaataatagaagccattttaaggaaatacctggcactgcccacagcagtgtagaatggcagaatgggattcttcttgctttcagctcctctaccagagaattcattgtttcattaaaaccggctaatgaatttgaggcttctgaggactgggaggctgaggtaagagactgtggctttcttgttgcctgtgttcttggcttgtttacctgttggactaggctgagctccttccctcccctgacctggagccaggaggctaaaggcatgtttggtttggcttcttgtggtgcgccagcagcttccctggcgcttctcaggtgctctgtcacagcattgtgatttctgaatgtcttccctttgggttggagtagaatcagttcttgggctaagtgttcttgacagtcacaccttggcagcttctcatcctccatcttaaagagaagcctctttgttcacacttcactgtttgttgtatttgaactattcctagtattctacatacatttagctattatgctgtttactgatgttttagtatggttttcttagggattccgctgaaatgtgtttcatacatatctaaagtcttatagccctctcagaatgcatgtttcgtcacctttaatagaccatgtgcatttccagcatttgcatccttctgcttcctgttctgcagtatactttccatatatatatatatgtgtgtgtgtgtgtgtgtgtgtgtgtgtgtgtgtgtgtgtgtgtgtttgtctatatatattgacaatcacataagataatgtgataattggacctttaattcgtcaaacatttctaagaaatcaagacaagaaaaattactttttcgtacacttaagttgattgttttctgtttgtgtttgtctttttattgtctaataaaacagtaattcattgacaccaaagcttcctcttgtgtccttttccttatggtaggaaagtacttctttgagcggatctatagaacagccattgtggcaacaaactttctttattctttacctgacaatgactttattttatgtcattctataaaaatagttttaataggtatagaattttgtatgttgccagttcgttactcttagcatttaaaaacatcatgctttcttcctgctttctctggtttctgctgagcaatctgtgttcatatgcactgggttttcctgaagataatatttgatgtcctctgagtgttttaactctgttattcactgtcttcagcttttagcacttggttttaatgtagctggacaagagttattttgctttaactctgatgggagtctctgtcatgagtctgtattttttcagcattgcatatttactgataatctaataaattaaacatgaggccttttgtcattgtcttatagaattttctgcaccacttttaaattttttctttttttttattcttaatggccagtttcaattgatcatatgcttcattgacttattttcctgttatccccattttactattcatatgatatgcagttttattttttcactttaagtcgtttgcttgtattctggatcattttataatggctaatataacatctttgtcaatcacatgcaacatcggtttcatttcattttctttgtgtctgttgattatctttgcccatgaaagtttatgttttcctagtatttcatatacctggttggtttggattatgtcttgggtatttggaatattttttctttttttattaattaatttaagtttacaccccatattttatctaccatccccatccaccctccaactgctccacatcccatacctcctccccacccatctgtttccacgtggatgtccccacccttcaccccatctgacttctaaactccctctggcctccagtttcttgaaggttaggtgcatcatctctggaatagtatatatgctattgcaaatcatatttagattcttttgagaatattgacagctgtacataatgagcacctgatcacattgaaagttacaagcttctttctgtggttccaatatcacgtttgcttccagtgttcttcagatctatgcagcgtgtttatccttcgtcagtcttagactttggcagtcatagtcctactggttaatgttgtttaactctgctggttaatgttgttttccattttctttttgtgtagattaacatcagttgcatactttgttcagctaaagctgtgactggatttcataacaactttatgaggttactttattgactccttttttcttggtgacctccctggtgttattttagctctctgaagctctcttttatgctcctccaaccagcaaactaaggctttatttatatcgctaactctcatttctatgactttgtcatgttcaaggccaagtggttaaagaataaagaaaaatataaccagtgggagttcatccaattttatgttaatttcatataaattgtttcagtgcaagaaaacctacctatgggttctttatagagcaatcagtggttaagagcactgactgcacttctaaaggacatggttcactccagcaccctcatgtcagctaacaaccatctgtaactccagtcccgttggatctgaagccctcttctggactctataggcacaaggcatgcccagggtacataaatttgcattcaggtaaaaaatccatacatatcattttttaaaaaaaagaaacataaatttaattcagatataaaaatgaacttacatccagtggacatattcatgtatgtatcacccagaccaaaagacaaaatagaacatgatcatatatagattaatttttctagtccctagttcctctatatagtcattaacatgacctctaataaacatgttttaattgtttgggaacaatgtagaatcatgaattacatattatttttcatttagctttgtgtgtatgtgggtgtgtgtgttgcatgtaaattagtgtactggtatgcagatcagttcaggacgcttaaaccattcttctacattgttctacaattgttagttgcctcaagaagagtctctcactcatgtggaagtttgtcatttcatctagactggctgtcagtgaagtctcagaatctgcctgactcttgtctgcagtattagggttagaggcacaactttgtttctttgctatattcctgtttatacatactattttgtattatgttttatatatttcgagataagggaattttagtattatctgtttctgacccccttaatctgagaagtatttacatgacatcattgtatatttgacaccatttgatatatcaaataggtagacaaatcatatattaattaaaacaaataattcatttattgatatgctttggtataaatatgatcttatcatttattgaggagtaaataacatttccatggtgatgagaatggcaggcttctttatttttacataaaggagtcttggctgcatctttgatgggggaggatgtagagaattttaagtgtatccagagacgttcaatgcttttataatcaatactaggaaaggaacttcatataaatatacagcatataaattgcagaagcacttttttgctattcaagaaatttttagaagttcttgaattttcataatcttaccttattttaaattcatttaacatttttaataacacttgtcaactcaaatatcaacttttaaatctaaacattctaacataaatataactcctatatacattgaattttatccattcattctaaagaatttcagtataaaaacattaaaaattttatttaaatcattacgtttcttagtgaacagaaaacctggtatgtgtagtataattcataacatctaatagcttagaatcttagctctttctagtagtgtttcctggccttgtgcattgtgactgtgtgcagtgcaatgggtacatgatatatgttcaaaccatgcagtggcgtcagatgaggcagcttgggccaatgcaaccagaaacagcccagatcaaagcatttgcattgggttgttgtatggtcagaatccttttgatgatgccaggtgttttgaagctcctatgctgagttatgcaactccatgtaaggttttgacccacaattaacaaaggtgtagtataggtgttcatttagctggttttcagtttggaacttatcaccttctactacaagtatagttcatttcttagtatttttattagataggtacatagggtattgttgtcaatatgcttatgttcgttcatctttggtagatactatcagttttctacatataaaattactgctgcagaaatagtgtgacacttccaatgtattgccaaaacttctttttttttaattttaattttatttgtaattcattttttacaccccatattccatttccctgtcccccatccaccctccgactctccacatccccaccatcctccccaccccaccccgtcaccatgtggatgcccccaccccccaccccatctgacctctaaacaccctggggcctccagtctcttgagggttaggtgcttcatctctgaaggaacacagatgtggaagtcctctacggtatatctggttttggcctcatatcaggtggtgtatgctgtttggtgggccagtatttgaaagaactcaggggtccagattaagactgctggtcttcctatagaataaccctgctcctcagcttctctcagccttccctaattcaacaacaggggccacctgcttctgttcattggttgggtgcaaataactgcatctgactctttcagctgcttgttgggtctttgggagttgtgacagatccctttttgtgagcattccataacgtcagaaatagtgtcagaccttgcaacctccccttgagttggatcccactttgtgctgtcactggacctacttttcctcagactcctatctatttccatccctgtaattctttcagaaataattatgggtcagtctgtgggatggcagccccccaaagaaaaaagaaaaaccccatatagaatacacaatatacagtccacagaatccaaaagggtcagcaagctgaagtgcccaagtgaggatacctcagttccactcaggagagagaaggaagcaatcacaagtggggagggagggtaggatttgggaaggaaagtggatggggatggggcgtgacagtgaggggtggggggtggcctgatctggtattgagtgagagaaaaggactgaagctctgagggccagcagaaagaatagaaacaggcaacttcaggaaataggaggtgtggggaccgcccagaatacaccagagacctgggaggtaagagactcccaggactcttagggagggacctttgatgacagtagggagagggaacttacagaacccacctctcgcaggaagacaggacatcaagccaataatgcttcttaactatcttttgtatcatagctttccgggtatatgtggcattgtggtgttacttggcattgttctgctttctcactatagatattgtcgtctgttgtcattgtgtgcgttagttattgcttgttttctgtctctttgccacctttcttatcattttgaaggtatttgatcatattttcttacattatattgatgtattatgtatgcagattacattttgcagatattttcttttagtctcagacttttctctacttaaagtctcttgataacaaacttgaacttattagtcttttgtagttagtatgttatatactatttaataacagaacaaactcctctgcctactccaatatcatggagacatttttatttcttattatccagtaactgtaaggccattaaagataatcgttaattttgtctgaaattcattttgtgtcatgtgtgacaggatttgagatggcaaaattcattcttaaggacatttggcacatagatctagcaccgtttgttgcaaaagttttttttttgcttttgtttttcttttctaagtgatgtccataggtttaacatgaaatgagcattttgtatttgtgggcccatttctagctttcttctgtcctgctaacctacttgtctacccttctaccaacagtgagtgggcacaaggggagaatttggaattagatgagggaggggaaactgtgatcagaatatactgaagaatatgcagtgattataatattattttcaagttaaaaggacagtggtgtgttcactctgacctaaagtctacagtggtagagtacttttatttttttttactctagtcttcgctgaatacttttttttgtttttttgcttgatttgattttaatacatcaaaaagttaagcccggcgtggtggcacacgcctttaatcccagcactcaggaggcagaggcaggcagatttctgagtttgaggcacgcctggtctacaaagtgagtttcaggacagccagggctatacagagaaaccctgtctctgaaaacaaaaacaaaacaaaacaaaacaaaattgctttgtgattaatatttaaaatgtacttttggaaacttaataaatactatttattgtaattattaggcagtttaagagaactttaaaatttattcctctagtctctgaaattctgtttaaatagagagctattttttgtctctacttactaccattttatcttgtgtcttagtgaattttctattgtcatgataaaatatcatgaccaatgcaacctttaggagaaggattcaattggtcttaaaacaaggtgtggtggcaggaaacagctgagatctcatatatcaaacagcagaagagcaagcaggaatcagagaaagaacttttggtattgtacaagtgttttgaaatctcaaagatccttgccccaagtggcatacctcatttaagaaggccacacctattaatccttcccagtttcatcaactgcgaaccaagtatttgaacatatgattctctgaggatcattctcattcagtccaacacattctactctctcactcccaaaggctcttagccatattataatataaaatgcatttagttcaacatcaaaaattctcacatttttcacattttacctcgctcaaatgtccagagtcttttctgacactcaaggcaacctattaattgcaaaatctactgaaaaatcaagaagcaaattacatactgtcaacatccaatagtgtagaatgtacactaccgtttcacaagggaaaatgagggtatcctgagaaaagactgaatccaaaagccaaactataaatctcatagttccatgtctaaagtcttagatggcttctcctttcatactttgcacaatagttgtctcacaagctggttccgctccccatgtcgagttcttggcagatatttcatagctctgacatctgtaatgtctttgggtcctcagctcaacccctgcttcattttcacagggttaccactgaggcagcacaaggtctttgcctctttcagcagctgcatgcagggattatgctgccacactttgcctggtgtcagtggatgtctttaactttggaggaagactccataaccctttattcatctatcctttattctgttaagtcagccccatgtagaagacgacacctttggatgtccacttgggatgatgcctgtgtccttttaatcacattttctgtgggttttgtttcttgtagatttgtaggagcagaaaatacactggatcagtcttctctggagtccaaagtcttgctgtgtgggctcttgccatggggtgtccttccctttattccactgcatatgagacctcttcttaatatattgatctcttccagcacaaacttttacagtgaggctctttctcttcaaactgtacgttttgcattttatgccatatttgctctattttattgacgacttactaggaatgattactaataaccacacaacagtcaatattagggtatcttgaaatcttttctgctgaaaaaatttttcattactttataatttatcctcaggggcatttaatttgtccttaaaggatatcctattaaggagagggaagaaaatagtcacattcttagacagaatattacaataatggtttccaggccaagtgaagatgttgccttctgaaatctcttgagactgggccttcatagctctcagcattaatatcttctaatctcctactatgatgtccaattcagctctttttagagcattgaaccactttgctaaagtcccaattccttccacattcctccaaaaaccacatggtcaggttcgtcacctgtcactgcaacaacacatttccagttacacttgtttgataaaataccatgggcaacttacagaagtactatttacttacacttacagtgacagagggttagaatctatgatgactgaacaacacctggcagcagcaatgggtaagagctcatgtattgaacagcaagcaggaatcagaaaaaacaaacaaacaaaaacactggatccaagtgtttgacacctcaaaaaccatccccataacacagttcatttagtaaaggtcatagctcataatccttaccaaacagtttgaacaactgagaaccaagtattcaaacaaatgagcctatagagccatacttactcaaatcaccatattgattctttgatttttacttttaagtgtgttccccatttaaaaaataagtgagttcatataggattgacactagcctaatactttattattcttttttttttttttttttttttggattttcaagacagggtttctctgtataaccctggcagtcctggaactcactctgtagaccaggctggcctcgaactcacaaaacctacctgcctcttcctcccaattgctgggattaaaggcatgcgccaccactgcctggctacaataaggatttcgtaaatgccatatattgttctgttttgtgtatttactttatatctgttgcctgttaccaaacacttaggttaaccctatattgtagctgcaatgaagtttttggtacagatatctgtcacgtatcccatttctcgtatcttagctgtcctgacatctctgaagcaagtgatttttgtcttttcttccccatgaggcgtgttgcactggtttgtagttttttgctcagtctccatgctcccattgctgattggggtctgcagtgtccagtggaggatagagttttataatacaaagttactgaagtagttttgccttctttataaaatgttgatttttatctttaaattatgttccctgtgtcctggtacctttaaacggttcttaaggaatacctcattttattatgctcttatagcttttcctccacagtgcggtggttataagctatgccctcaaaacaaagccggtggccttcttgggatataaattagatttgcataatctttaagtataggtggtataatcatggcatgtaccttaatagcataattctgaagacattctattaattccaaatgtattttatactctcatctatatgaaaatcatagctatatttagatataaatattatggagacttaaaagagtttgctattgaagtttatttatcataaaaagttgatctacttacatgagtacattcatctcacaagtaaaaactgttgttttttttgaaattgaaaaactatcaagaattaagctattttctaaaagaattggttatactttccctaacaaagaaatttttataatttagataattaagtaaaatgtgttttgtatctaggaattcatcccaatgaaataatttaaatacagaaagtaaaatacaaatttaaagcacaatgaagctcatcaaagtctttaaaaaaatcaaaaataatatgtccagacacagaattggtcaaggacctatggcagatttgtctttactagaaaatactagagatttaaaaatgtaaatatgcttatttgtttaaaaaagaagatgcaaaataatgtacctcttgaaattaagactaaattattgaaaaatagcccttctaagactggaagataataatctagtataaatgaggaggttgtatttcagaattttagaattttttcaaagtttctttagtaaagcatttcacttttttcagtaggggtgaatgggatatttaaaatgaaaggaaagaatgcaaagtatttcaaactatttagagcagaaaataagtcacacaaatcaaggaacaaaaggaagaagtctgaagactatgctttaagaattctaccaacgatctatctctttagccatcactcagtcccatggcctttagtgagtacattctcctttccagtgagctacttaatgtctacactggaaacagtaaaatacaattcaaaaacgacttctagatgacatttgtttatcagcaccactggcaggaaagaaatgagaaatatttcatttcagttgtggtgttgggattttggataaaattgatgatttagaagtaagtactcaaaataggcattgtagcatcccggaaggaaggagtgtccattcttagagtgtgcattcagcatcaagttcttaacgtacagttcaaaaggtttaaggaaccaccatattttagttcttgtataaaaaatcaaatcacaagaagatgtgacaaaatgtgtttcatcttctgatctaaaattatttatggcaagtgcatatttcaaactcatatgtcccatgtccctgtacctttccttgaatacactgttttagaccctcttcaagtcatgtatgattatcagactctgattatagtatgattaattcagatgaccttagaagagaggacattacctattcatttgtgatttggaccatggaaagaatccactgtttttatgctccctaacttaacaaacatgtttttcagatcttttaaaatgacatctatgacatagtgcaaaccatattgttttttatatatagtgtgctcatatttctttttctgtattaagattcaccaacattatatcagtgaaacaaatacacggcagtagatagtacttatgatttgctagtggccttaagcattgacagcagtaggatccgtgtcacctgcctgtcctcccttacaaggcagagggtttgtacttagctgaaattacaattcatgtatatttggcacagacccatgcatgtgtgtacatcattagtgtgagtatctgcatagacttaaagttcgttaggtaagagataagacttaacatttcttttctcatgctgtattattttgttaataatgttcctattttcttctgtttttcttccattttattttctctccttcatttccaaggtgtccctgatcatccaattcttattaggtagttaaattatgcaagcaccaatctctgtgtccccaaacacacatagctaatcaagagtaaaaccatttcttgtaaatttacttctagaaggagtcctccttcctctgattttgaggatggatagatgctcattatgatctggtagacaattataacatgcacgttagagtgtatgtagatagacgagtgctctgtgttaggtgttgagactttttattttactcatttaaagacagagatttaaatgtgcttgtttaaattcaacaagcccttagagccatgaggccttgggggtaagaggtgcttaaaaccaaatagcataggagttgaagaagtaattatatgccagactgaaggtggaactgaacaaagactgggctggtgtgggaaaagggatggcaaactgaattatgtcccaggtatccacgggccactaaaacatgtaagagaaggtgcatcttcagacattttttaccaaactctacaaaatgcattgcgtttcagatgattagctaatctgatttcttcttctttttaaatatattttcagctttaacctaaatgcttaaaaatcttcctttcaaagatgtttttagaatacaaagactttattatgcaatgtgtattctgaattcagtgtggcagaatttaaatataaaataattagagtagaatttcaaaatcctcatttcattgaaaaaaaccccaactccccccgcaaaaaaatcttttgaagcccacctctttttttccaaaatgtagtgttatgggcaggaggaatgttgtgaattactgagaaaaatttaggcattttagaattctggcatcagtgtttttaagtctcatcttgctcacacacatagtttctgagaaggtggaagggaagagaagaggtggatgctgattgtgtggattgtctcagggatcctcgcctcattagcagctcttagtactgattgcagaacttagagatgacccagagccagattaaatccttcttccttctcaggatggtgcctctctctcccctttaatagaattaaaaactataaccagagagcccaaatttgtaaggttctgcagttttctataaaaaattcagtattttgcatttcccaaacagtttttaaataaagtcactataaatatgtaaatacttcctattgtccatggggtttgaatattatttttaagctagcctatagtataatgggttttattatagcatcttcctgcatatatgtcataatacttttttatttatctctttctcaactgtattcccctattacaattacttccttttgctggtatccttttttataaatatcaccccttcttttctgtgccatatactccatcttaactgctgaaaaattctcaattttgagggaaaatgttattttgaattataagggctgcttggctgtgttgctgtgatgaggaatagatccctgaatttctcaacagatttcttttcagttgttttgttctacattatgtgcatattgaagatggtctcattctcctatagcctgtcttgttaaagactgaatgaaaaagggttggagagaggaaaggccaccctggctatacatgttcttacatccagcccctgctaatccactcttgcatgtgaggaaggagaattcacactgacccacttgtttatttattaagtaaacacgtgttacacactgcccctgttcaaggaatagagacaaaatttggttcaaaatttagtaaaaacaatacctgattaggtggaggttactaattttgcgaaatttacactttcctgttaactcaaaagagaattctaatttacattcagtaggaaacaatagggtgtcagaaaattgaagtagcagttttaatatgtccacaatttatatcgaaagaaaggaagaagcctccattggaacagtggggacagcaaagctgctgaagccgttgatgcagaagaaatggctaagttgagatctgtagggtaaatggatggggaatttgtcttcaaagcctcttggtaccctccaaggaagagggtacattttaggtatcaggcatactatacataatggcatagtgaaacctataggatttcagtagggctacaggtataccccattcatgtgtttaaaactttaaagctccttgctgggctgcagagaaggctatgaatgcagtctattttgtttttgacaggaatattttatatagtgaccattattcctccttgaggtagacagtggatttatttgttgacaatgaatatggtattgtgggatagaaaatttaaggaaagagatgatttgaagtagatgacaagtagaaaattaatgagacaattaactctggaaccttggaagactttacgtatcattttgggtccagttcagtttggaggctgtgaggagggatggttatactctccaagcttgtcgggctcacttagattctgcagtccagtaatggagaaggcagatcctgctggcaggttgaattttaacctgtattgctactctttttcttcctctaacccagtcctcatctctgaagcctgccaggtgaactgttggacaccctacctctctgaaggctttacttgccagaaagtgattattactaccagaaaacttaaataaatagcctgttataagggagtggataaattccctagcaatcttgtcctttagtgtgtgtaactgtgaatcctagaggattctagtaagagataatttcagtgtataattgcaatttccataacctgtttgataatgttccgttcttggcctcccccacccgctctctctctctctctctctctctctctctctatatatatatatatatatatatgtgtgtgtgtgtatatatatacatacatatacatatatatatgtgtgtgtgtatatatatatgtgtgtatatatatataatgtgcgcgcgcgtatatgtatatatatatatacatatatannnnnnnnnnnnnnnnnnnnnnnnnnnnnnnnnnnnnnnnnnnnnnnnnnnnnnnnnnnnnnnnnnnnnnnnnnnnnnnnnnnnnnnnnnnnnnnnnnnnnnnnnnnnnnnnnnnnnnnnnnnnnnnnnnnnnnnnnnnnnnnnnnnnnnnnnnnnnnnnnnnnnnnnnnnnacacacacacacatacacacacattttacaatgaatctagattacatatatgtacacacatatgtacatatatacacatataaaaacacatatcatgcaaataaaaatacatatatgacatgaaaaaaatctaggggactattttcaggaggaaaggactagcaggagagaagatgaataacgatggaaaatcatagtacttgtgtgagcatgcagaatgtgctgtgatggtcttacgtgctggtctgaataagagtagcttctccctagtactatcatatttgaatgcttggtcaacagggagtggtgctatttgaaaggattaggacatgtgactttgttggaagtagagtgtcactggggtgggccttcaagttaaaagccatgtcaggtgacacctgtaggtcaggatgtaaagccctcagcgctagagtcatgccagcccatgtgccactgtgctccccactataacgataatgtactcacattctgaaactggatgcaaacctctagctatatgttggcttttatcagagttgttgggttcattgtgtcatttcgccaaaatagaacagtgactaagataacataaatgaaaatgtcataatgaaacacattaattggtatgaaaactgaaaaaaaacaaggaaaaatgcaaagattagattactactgacatacacattaaactaaacaatgaatgcaaaatctttagcaaagtgtggtaggaggtgaatcactgataacccttactgcttgctgttttttctgaatactgttgcttgtgtggatctctattaatctttattatgaatacttttccactcatgatttctttacatgtcattgtctgttttctttttgttctagttattttgttttagagacaggatctcacttcgtatcacccactgcctggcttgaaacttgctttggagatcaggctcgtgttggactcagagagatcctcttggttcagcctcctgagtgctgggaatagacgtgtgcataactactccccagccttccttgtggttttaatgtcagaattatgtggatttttgtaaaaataaattgccttattgtttcctgtggtccaatgtatattgtatcaacttgaactagtttgtgggtcatcagaatttaaaattaatcacattgccagcacaatttgtcaacacataattatatatttagatgatattattatttttgttcaggttttccaattttttttcagccatttaaaattttccataaaactgcttttgtttacattaaaaaactttaagcaattggagcatgtaattaaaggtattcaattaaatgcctaaaagttctgtctgttttcctttttaatgttgttgtttatagtctggtttcattcacttagctgtttctgcttttatatttcccaatgctcctttcttgtagggtttgtaacctcttgattatactagccctggcctttcttttaacatagctttaagctatagatctttgcctaagattgaattatctatgtcctatgagacttcatatagattttgtctttgtcattctgttttataagttgtgaattttcaggtttcttaaatctgtagactactcaaagttctgtttttcagcatgtccattatggaggtcgaggtaaagggtatggaagttcaggtccaggattaagtgtgtgaatggaggatctaggtttgtcactcctgtgtcttgtgttgagatttaccgtgctttggcataaggtcatttatgtgtgtgcctggaaggcatggatatcttgtaattattagatacaaagctttagagctttaatatttgttaattagattattgagttattaaattaccattacctttttattagccacttggcaattgatgatacaaatacagtaaaaagctttattatgatgggaatctttgccctgtttgttatatttacatctgtgctattagatgtttatggaagaaatttattgtactttgttgaattatttaatttttattatttagtgactgcctctattccttaataacgtttttactgagaatgaaaagctggccattaatctagtgacctcaggtttgctgtcatttcttgagaacactctacctcattgtgttttagctgtgattattgtcagttctttgttaccgcattttacagttcacgctagttgttgatcacagtatgattgttctttgtttatatgatcactttcgtgcttaattggtagtaacctattttatattttctgttcttttcagtttttaaattctattatgacttatttttgggaaatgttttgataggttatggggttttagacaggagaaatggggggtggacatgatcatgtctcattgtgtatatgatgaaattctgaaaggatggaactttattgtattatttgaattttcttagggttctttcatcccattttaaaaattgtacatttcattttcatttgctatctgaaacgcttacctttaagcattcagtaatcatttaataattcaacattgccttgctactatatcagtctttcaaactttatcaaaatgtattagatttcatcttgggtacatgttatggtttatactgttttatttgtccccatgccccatctttaaccttaacccctgtttaagattcttgacagtgctccttcttttgtggtttttatgagctccagtttgactggaaattcctgactgtgtgcatcttttgccagttccacagtttgtgctatgatgtttaactattaaaggcaactaggttatttataccaagatatcggcaataactagcagtttattgccttttatttttaaagaatacattactgaataattaccaatatgatacattagtatcttctcccctcttttatttttcccttcccctttctgaatttcactcgtttattttaatatatatctttatgttccattaatgagtggcaatgatgaggaaacttttgatctttattagaaacatgatttctgcttgctttaatgatcctatatttttgctgagtgtataattttgaagtttttatttgctctgagcactttgaagacattattctttatgtattctagttttgctgtgagaatcacttagctgattgcttgcgtttcctctgcagctaacctggttttctctttgcctctgacatttgtacatgtcttagtatatgcctttatgctttctttcatattctactgggttgtctttcatgagaaatccaaggtggggtgaattcccttgcctcgcaggtcaggtttcttctggtaggtttcaccagtggaaaccattgataattgattagcaggtaacaggaaaggaaaggtaaacataattaatttctaaaatttattcaatgtcttcagtgcagtgagctcctgctatcctttcaaaagtttttaatttaaaaattatatttattcatttttttctacttgaactcctcccagatcctccttatctccctggttacccaacttcatttcaacctccaatcatgtttctttctcctaacccccaaaaacccaaaattaaaaattagaacaaacccaaaattagcacacacatacatatagacacacacacacacacacccaaaactaaatgaaacaaacaaacaaacaaaacctataaaatctacatgactcttgaagtttatttttgttgaccacgactcctgggcatagggccttcctatgtggtcggtattcccagtagcactacattggagaaacttactttccctcttccagaaagcatcagttacagatagcttcttctttgggtatagggcccttatcaaccttgcccttccattgctggacactatctgccttgaaattgtccaggttccatgctctcattgtctctgtgagatcctgtgtgcatcagtcctgttcctttggagtccctctaacacatcattgtgttctacatagatctctgacccttgtggggaagcgtttgataatgacatcccatatagtgtcctaaactctctttccctgtgtacagtgaccagttgtggatctcttgttgatacctgtctactacaaggttcattaataaaggttggacaatatactgattggttggtatagtaatatatcattaggatccattttattgctgtgttcctttgccaaacaataggatttttttttctctaggccataacctagctaaacccatattcttggcactttagtagggccgggtaccatttcataaagtgggaatatttcaaatagtagttgtttactaccagaatatttgtgccactattataaccctgatttatcttgcaggcagattgctgtggaggtcacagtgtttgttgctgggtgatatttatggatacttttctcttacaggagctggtagggtaccttctagcgatatgaacactaggtagtgggggtgaagcttctaggtggattctacttctccttattggatgatgtaagtgtgattcttaggcccaagaacttaccatcatgttgtggaaaatagtcaatagccagtgatgttcagagaggtccatggaacatattttggccaacagttcaccaaaatataacccatttctgggaccggaaattttattaggtggtatacaatatatagttggggcattaggtaccctattatatggtcagaccatttacatttctgaaatattagtacacagtggcagcctacagaatgggaaacctttacaaatacatctgagaaggcttagtatctagaatatatgaagaactaaaacaaaacataaacaaaataaaacaacccctcctgtacattaagaaaacaaacaaacaaacaattagaaaatgaggtacagagtaaaacaaagagttcttaaaagatgaaatccagtgtctgaggaaaaaagaaatgttaagcatccttacttatcaggaaaatgcaaattcaaactattttagcactttatctttcttcagctacagtggccaagataaatcaaatatgtggcaatacatgctggcagccatgctggggacagaaaacacttacttgttgatggtgggacaaaaacctgtacaactactatgaaaaattagtatggtggttctttaggtagctgggaatagacatacttcaagatctagtgataccacccttgagcatacatacccatacccagagatcgctatgtcttaaagcagagatacttgctcattcgtattcactgctgctctgtgtataataaccacaagttagaaagcacctgtatccactggcaaatggataatgaaaatttggcacatttaaacaatatcatgttattcatttgttaaaagtaaatttatgaaatgttagaaaaatggaagaaacagtagatgatcctagaaacagatcctgagacttaaggtagtctagaccttgaaagacaaatatctcatgttttgtctcatgtatcaatgctaggttttaatctttcgatatgtgtgctatagaattaggtacctactaagggactaagatggagaagaggctcgcctaatagaagagaaagagagtgtagtgttaggaacagagtagactagaaggattaaatgatgagcgtaactggaaggcagggtaaagaagggactctggggaggggcagaaaccacatggaccacgctagtgctggctttgactctaaggacatgtctttccttctactgtgcctccactactaatctcatgtctgtgtcattctcttggttcaccagtcttttctaccttgctcttgacatggcctccctctaagatctgaaagagttttctattatgtatttgaattttaatgtctttcaagtctggaaatcatgtattacttcagatattgtcattttgtttttgacttctcattctgagttattagatacatgattggaagatggttttttagtcataaaaagttgaatctagcttagtaacatacaaagaaaaaggtgaattctccaacattactagataagtaattcttactttccgttgaatttccttattaaataataaaagaaggtaaggtacttcaatttttaaaactataattggcattattgattattgaaataaataacataacaacaatataagtaataacagtaaaataaccagcaagcaaattgtctgctgattccagaagaaatgtatgtatatcttaataaagttttgaattacattgtatcaatgactacttaaaagaagacatatataaaatgttaataaaattttgtcctattagtttccagttggtttcttttgatgtttgtgttttagagtttttgttgctgttattgttgttgttgagaaagaacttgaagttggacgaactaggaggtagggagtatctggggaagttaggagagggacaacatggttagagaggacattgtttgaaaaaatttgttttttttttcatttttttctttttattgaaaattgattcttttctcatacaatacatcctaattatagtttctatatcttaaactcttcccagttattccccaactttcctccctctggatccactccctttctgtctctaactagaaaagatggggcttctaagagatagcaaccaaacatgaaaaaataaaatataacaagttaaggggaaaccatcatatcgaggctggacaaggcaatccaacagaaggaaaagaacctcaagagcaggcaggcacaaggatcagagacccactccctcctgtaccctcaggagacctgtcagagtacagcttcaaaactgtagcatttacagagaggacctgtgctgccctgggtaggccctgcacttgctgcttcagcctatcttcatagcagctttgtgtagttgattcaggccttgttctcctggtgtcagttctgcccctgtctcttccactctttctgcctcctcttccacagattccctgagatctgaggagaggaattgatggtgacatctcatttagactctctctctgaaatagctggcagtggtctctgcatttggtcccatgtgttactgaaggaaacccctctgatgactgactaaagcactgatctttgagtagagcgaatataattttgagtcattttattgaatctttttaaactgtatgtcaataatgtttgctttatccgagctgggatatctagtttctgatttttggtcatgcaggtagtgtctagcatgaaatgcatcttcaggagtgggccgtaagtaaaatcagagattgtttggccactcttatgagttctgtgccctcattggcctcatgtattttgcaggcaggacacattgtaggcaaaagtgttggtgcttatatttctccttcagtagcctgaagaatatcttcccacaccaaagccactagaacataggggtgaaggtttcatgtaaaatatcccttagaatacttagtcatggaagtagtttatagtctgaattaaatctcctggtcaggccacttttcctgggccccagatgagaccattttaatgccctgagtgagttagcaactttctttactaatagttcaagaggcatctctaattcgactctacaagtaaagagcaaaaacatttctctattctacaacatgtatctgggcccattaaattttcataggagaattgtgctaactagaagtcaacagaaagacatagtcagaaaaattttatactaagtataatggctaatcttagttgttaacttcacagatctgggagcagcacacctcagttggggcatgtgtctgtatttgtgaagtatttcaaatactagttgatataaagcggggcacggtgcactgtgagcagtgatggctctagcctagaaagatagcttagtaaccttgaggaaaccacccagtaatcactacaacactgtgctctgtcctatagcttctgcttcagttcctgccttagcttcccaggatgatggactgtcatctgtaatccaaacaaacttttcccttaccaaaatttgttttagacagtatttcatagaaataaagaaatcgaacttgtacacatactaaaggtaaaatactctctatctttacagtacactctactgttgttctcttcagtaataaggacagtactttcaatgctgggttgtgttggtatggggggtattattcatgtattgtttcatggaaactgttccctaaacatctagctcacaactgcctcttgtatcagtttttggctatagtgttttgtgcccagtaggctttctttatcttttggattttggtttagtttagttccttagtttataacaatacgatatcctctcccttttgtgcaactatgatgccactagcagggccctgtaaggaaatgcttactttatgccatgccggggactgtgcttgttttgttataggcccataaagggaagcaccgtaaataatcctgtaggatatttagataatcactgttctaaatacagggaatatggaacttcctgaaatctaattgtctggtggcaaattctaagcacttaatcatcctacctggtaactctggtactgcccagaacactgtacacctgggctagggccagggatcacaggaattgctggttgtttatttgtcaccacatcacaagaatggacccagttgacatcaaccttgtaactattgcgtaggactgactttagagggaataaaatttatgactctagcccagattgaaactgactagttagagactctgtgagcggtaccattttatctgcctagcagaaatggtctgccctgtctcattttctttccctggtgatgtaataacagtgtcttctggaaggattaacaagtaactaactatttacttaagtggctgataaataactctagtctgttaataattgtccatgtgtttcaggtagctctgcataatctaaggcagtcttacataccccccaccctacattggtcagtgtttccttgatctccttttatgccagatcactgttaacatgaagcaaatcacataaataaaaaatgtaaatatttaaaataattcgtgagtgtaatttgtaagtgatgcatgctaatgagtctgagctgtcagtcagtgctacatatatgtaagttttcacttcacagtatgaaagaataaacatgacataaattttatgtgtcgtgctctatttttttaacacatggtggtgataaatgcatccgcttgcacacagtagatgctcagtgaatcttgctggtttagtgaataaattagtctgtactagatacaacagattttcagtcctgagttgttcttgctgtcatttcactctgcataatttaaataagttttactaaaatgattaaaaatgtgttattgaattactgtgtagatcctagagtaatgggatgacaacgaccctgtgtgtaccctgatgaggagacagagtgtgttctctgtaggcacacctagtggagttgatgtgtgattgaattaatctatttctcaaagaagagatagatttactacttccatatggcactttgtaaagtttcttttacctctaccttaacaattgatattttattactataaaaataaagtttataatcaacagttagctatttatgaacctaagtagagtaaaatagttaataatagtttttaaatagttaataaatactcttattcaacagattttagatgttagattcaaggtccaacgtcttagtttttatgtgtatatattctatttttatatcttcattgtcactaccctatgcactttaaattatacacacttgcataatgtacaattatcctatacatttaaagattccataaaattttaaatgtttaaggtatatcaggagttgcagaaaatactagtttatatggcttgatatacattacttattttctctcataagacattcaaatttcttataatttttcagtaccatacaattatcttctatgtttatttatttattgtttaatctgtatattgtgtacatgtttgtaggttagaacctgaatcaaggcacaggtgtaagtcagaggacgaactaaggagtcagtccttctaccatatggattccaaggatcaaattatggtctttagaagtggcaacaaatgtcttgagccttttcaccagctctaaatgtatcttttaacatagatttttatctgtttccaataatatgaacagatgcctagaactaaacctattgagaaaaaaattcaaactgacttgtaaatacctacatatggcaaccttccagaaggttcttaccaattcatgctcacgtcagttttatgtgtgatgctattttattgagctatcataaaaataattacctatggaccctttgagcaaagtttactgaccttatcatgttgctgttaacagctaggcttagatgtacataaatacttcattttccattcagaaagaattatgaaacttctagtttggagaatttagcttgtatcctttctgttccagtacatcttccatctaaactcaagtgcgtttgtttgtttattttctcacatgtgattgtcagcttcaggcattaagctgggcttgcatggggctctctaccagtccctgcttccctagcaggtagtccagggtgtcaggctgaggcactgtgcagtatgccacatgttttggaagcagtgcttctcatagactcagtctgctagtgatctgttgtaccaaagttaaaggagcattcaaagttttctttctgcattatttttgtggactgctctgtggaagcactttgttggctcgccagtgttctagcagagtgagggcagatgaatcggaggagttctgtctcagagagcagcagtcatttgtattagcaaggcattaggcctggaagaacaccaagaaaaaaattcacttgtattttcctagtcctctagtgagaacatttccattgcagaggccatggtgagtctcagtggcttgatgacactgctgagatgctgtgcgcatacattcacatatatgagtagtacctgtgggaacatatgaagatcaacgactccatcttccttatacactgctgatctgcacaagttgtatcagtacaaattctgaatttggtttggtaagttaatttctgcttacatgacatctctgatttccatttcagagttcttgataaattgcaagtctctttgtgcctcatagctgcacaggtatgtatgtgaatttcttatagctatgcaagtatatgtattaactgttgagttactacgtcttgttcattaaaactgcttatggatgtcataatatgcagttgttaatttttgatcatttgtcttataaatattgacagttccaaagaactgtactttgtaacacattgcattgcatatcactgtaagaatcagacacacatttctaagatttgatgaggcagaataattttaattacaaagcattcatctggtgaattcgagagtactttataggactgtgctggtaaagcaactggcatccgaggtcaggccagtggagaagcactgtctttggcagctttgttttattatcaaacttctttgatgtgctttaagttgtttgtttgtaaaggttgctttaggtcaggatggctgcatacctactctcttctgcactgtctcagtcaccagatgaacctggacagggtgggagtgtttgcactggtttaaaatttcagccatgcagtgttgttgtttctgggcaacatgcaggaattcagcaaagcttggttgcacctgctcagttgttgctcacagctgtgtcataggaggggcagcacagttaagcttgttagcagtttgcctgtgctgtggcgtatctatgtttcatgtactcttgagttagaaagataggaggtgtcgactttgggctattaaactgggccattataacactcactggttatagtttcaaatacttttacttaattcttttctgtctcaaatgctcaaatatttttactatatctcaactgccttagataatgtatatctcatatagtgtatctctggagaaaaccgtgttgataatttttcgtcctaagagagacattttgtgtttggcttgatttcaccatgttggcagccccactgtgtggggctggatgtagttattgatccatttagctgaacagatttgaaagcatttggctatcagtggacacgtggggcccattcagaaagtgtaagagtatattgtgaggagatatgacttgtgcatgtgtctctcctgcagttggggttgaagaaatgggaaaaaccatgaaattaaggtataaattctagatgagggactaacatacccatgaaatgttaaacctgctatattatcatttaatcaaatctaccttcttggtgtttttccagagttattcgtagtgcaattctgtttcttttgttaatagctttatttttgttctgacaaactaggatatctttaagagatttgaactattattgaatttatcataggcaaagttctgtaagtgaaatacaaacagctataattttatataaaggtatttaattaatttattcacttgtcccagattcctgatattgaaaacttgtttgtatggcttgtagtagtctccttaacaaactaaaaatactagaatttaataacacaaattttaagtcttataactgctgtatttttcctgctattagcacacatagaatctttttttaaaaataaaacattattataatatggcctgaattaacctcttgtcttggggaataggaaactagagacagagaatgtaggggcgtgcctgtgctccttacacagtaccttgtacagagcacttggtcaaggcacgctgggtagcataaagcaagcctggcactggggaagcagccctgtggtccctgaaggcatgattcgtgaacagtgatgggctttactttacgattcacatggccagctagatgctgagaagccttgttgttgaaaacaagcttagatgtaaaaatctcttcatctgcattgttaaagatcaagaattacaataccagtatttactttatatgaatatttactgactacgtgcaaaatatttttattctccccattatacatttaaaggccgaggcatccatacttaagttccttgtcaccttggaaaccctttggagcataggcacgagcaacctctctgctagatgctccaggcctgagccttgcacactcactgtgctccctccttgcccattgctagctcatcagcttcacagaaataaaatgtgtcttgacttgctttgggtcaggtaagatcagaacatattaaaaaggtgtagttgttttactaagcagaacgagtggaacctatatttattctatacatatttataattatggattctatcagcctctgaatcccaactgcaaatacataacaaaggtaaagtcaaagtagagcagctgagatgtgctgtaggtccttctacgattgcattgtgtgtcttgaggtgagcacattataatgatacaagtcttaagacagtaataactacttatttatttacttagcaaccgagtacttgttctttgcttgactcagtaacaaatcagaatacttactcagggatcagaacaacaacgaggacagcggagatatatcagtaggtttttttgtttgctttttttaggtttcacaacttactatttatgggactcagttgaatctcttgtatcctcacttgtaaaattctaaaactataaattttacatggtattaatgcactaaatgttagatagcatgtgtcacatgttagtgcaattgttagcacatagcaaatgcttaaaactccattcttctctatgtgcccacttctaaggctactgctgccatcaccatgactggttttagacactgacggaaaaccatctgagtaacagcgatctgtccttttggtctggaattgtctaatagattgtctcagagttaatagttaaagatatgtctgtttctttggctttaagggagattttataactatcataaatcaatttactgagtcagaagaaatgttaatatacttttattgttttaccactttttatcatttagaatacatgtaacataaaaattacccatttatttctgtttaggtttaaattttactgattttaaatatatagataatgcttaatcagacaccacaacaagccattcataaaatctttttgttttagaaatttgaaaattttaaaacactaaaaaaaaaagtaccattcattctttccttccttcagttcttgaaaactattttactttttgtgtcaatgattgtgacaactttatacgtaatgtcacaaaatacatgattttgtgtgtgtgtgtgtgtgtttgtgttatttcagtgaataatattagggtttatccgtgttgtggtacatgtcaggtttctcatcttcaataactgaataatatttgacagtgtgtatataccacatattgcctgattattcatcttgacagtggactctttgattgcttatacattttagttttctgcatatttgtggtgaactcgtgtataaaccttgagaacccaattttactttattttacttagaaccaaaaatggaattggtggatcatacagtaattccatttctcaaaaaattttgtgagattgcatttacaattggtggaatcattgtagtttgtatgtgtgaatagcactggattatttgtattgaaaagtattacaagagtcaagttcatcaagaaagcacatgacttatgtgaattcaaatgacttaagaaggctatgcctaagataagacatatcctgggagcccatgatacttttagaattcttcaaaagtgatgtagtcatcacttgctcatattggaatataggatgatgggactgaaactaactggtactgaaatttcagtttattcaatactttattccttaccagagaatctagaccttattgtgtcatgtatcagggttacattggtcctatctatctatctatctatctatctatctatctatctatctatctatctatctatctatctatcttaaacttcagattttatcctgttcccctgtctccacaggaatgttcttacccctccacccccaccccaccagaactggcagtccttggctgtatatgtattgggggcctcatatcagttggtgtgtgcttcctcgttggtggtccagtgtctgagagatcttggagctccgggttaattgagactgttggtccccttacagggtcgcccttttcctttgcttctttcagccttccctaattcaacaactggggtcagctgcttctgtccattggttgaatgcaaatacctgcacctgactctttcagctgcttgttgagtctttctgagggaagtcactttaggtccctttttgtgagcgctccacagcttccataataagtgtcaggccttggggcctccccttgagctggatcccactttgggcctgttgatggaccttcttttcctcaggcttttctccatttccatccctgcagttctttcagacaggaacaattatgggtcagagttgtgactgagatggcaactccatccctcacttgatgccctatctttctgctgcaggtggactctaaagttccctctccttgatgtagggcattttatctaaggtccctctctttgagttctgagagtctatcacctcccaggtctctggtacattctggagggttcctccaacatcctgcctcccgaggtttcatgtttccattctttctgcaggccctcggggatttcagtcctgttctcccacccaatacctgataatgttcccctctctccctgcctcctgcatcctctcccacctccatcccccaatcctcttctccttctagatccctccctcctcccttgaggttgctttcttctccctcccaagtgggactgaggcatccacacttgggcacttcagcttgttgaccttttttagttcagtgggctgtatcttgggtatttggcacttttcttttttctttctttctttctttctttctttctttctttctttcttcctttttggctaatatccacttattattgagtatataccatgcacatctttttgggtctgagttacctcaatcaggatgatattttctagttctatccatttgcctgcaaaactcagaatgtcctcattcttaataactgactccgttgtgtagatgaactacattttctatatccattcttctgtcatgggacatcagggttgtttcaagcttctggctatcacaaacaaggccactatgaacatagtggaacatgtgcccctgtggtatgctgagtcatccatcttttgggtatatttctaagaattgtatagctgagttttcaggtagatctatttccagttttctgaggaacatccagattgatttccagagtggttgaaccagtttgcattcctaccagggaggagtgttcctctttctccacatcctcaccaaaatgtgctctcacttgaggatttgatcttagccattctgattagcaaaaggtggaatctcagagtcgttctgatttgtatttctctgatccctaaggactttgaatatttctttaggtgcttctcagccattcaaaattcctctgttgtgcatttttaaattagttctataccccattttttgattgggttgtttgttttttgggggattatcttattgggttctttatatattttggatattagccctctattggatgtggggttagtgaagaatttttttccaatctgtaggttgctgatttgtcttattggctatgtcctttgccttacagaagctttccagtttcatgaggtccccttaattaattgttgatcttagagcatgagccattggagttctgtttaggaaatttccctctgtgccaatgagttaaaggctctttcccactttctcttctattagattcagtgtatctgattttatgttgaggtccttggtccactttggacttgagctttatacaaggtgacaaattcgggtctattttcttttttctacatacagccagccagttagatgagcaacatttattgaagatgctttcattttttccattgtatgtttggcttttttgtcaaagatcaagtgtgtggttttatttctcggtcttcaattctattccattgatcaacatgtctgtctttaccaataccattcagtttctctcactattgctctgtagtaaagcttaaggttaggtacggtgactcccccagccattcttattgttaagtattgtttttgctattctgggtttttttttttcttcccagatgaatttgagaattgctctttccatgcccatgtctttggagaattgtgttgggattttgatgaggattgcattgaatctatagaatgcctttggtaggatggccatttttactatgttaattctgccaatccatgagcataggagatctctttattttctgagatcttctttgatttctttcttgagagacttgatgttgttgttgtacagatctttcacttgtttggttagaattcccccaatatattttacatttttttgtgactaatagaggtttattccaaagcagccagacttgtgccttaggtgaatagttgttcccttccagtaggtaatcaaattttataaacagccttgatcacttctctgcagtcgaggggggaatatattccccaaccttctcttttgacttatgggttcacatctttccctaatgtctcttcacagtgcctcccctctatttatatttattgcctcatgttcaaattcctttttttatagagcacaaatcatatagccccaatgaagatatatatatgtatatatatataatttcatatttcttagtattaaaaattagaagttcaatgtcaaatttgggtttttataaatatatcgtctctgtgtgtgtgcacatgcgcgggtttaccacatatgtgtgggagcctgcagagtccagaagagtgttagatatcctggaggtacagttacaggtatttgtgatctactcaacatgggtttggtaatggaacattggtctggaagtgccccaagctcttttaactgctgggccattttttccagttcccagcacgattgttttgtttttattgagacaatttacttggaattgttgtattaatatttgagtgacttggtgtactcggacccaaatataggtcaatgttaacttcctctacagaattaaatatgtatgtgttcatacacaggtgtgtcttactgatagtgcttttagagtagaatactagcaatttgttcatagtacacagctagtaaatactaggtctgaacctatttagatgttatttttaagataaacttcataactaagtcaaaggaacatcatatccatggctgtgttttgttttgtaactagggttatgtcaaattcagacactattgttactgtatcaatggcaatcatcaactgcttgttttcttctctcctgacatttagccaatggttatctagaaaagcttagtgcctttactttccctattcggtgaaatttcggatagatgaagtctatgcacatgcctcaaggacttacttacttactctgagacccactctgtggctgcaagaggtactatgaaccagtacacaacttgagtctgtggtgtcactctgtatgtgtgttcctatcgtgtgctgtcttccttcctcccttctctcctctccctcggtctttccctccttttgtctctctcttctgccctcacccttgttttctcaccttttccacttttctgtttaatgtaaagccacgccataactggtaggcagtgaagggagctggcacttcagtgagagcctttgttggcgtgtgctgtagcctggccacagcctttgcttactcgtccacactaaaatacaggagattatgtaccttgcataagtttagcatcttaccattggaaacattgtgtttctcacattcaaaacagaactagctcatgacccaatttcactaataattttcttaagtaaccattatacgcataagatttttttctacccactgtctgtctagcctggtttaaaattttatatatgtacttttaaaaaattgattagctggagacaagcccactcctctgttctgtataataaggatttaaaaactgcatgctgaattctgtatagtgtaattaaaactgacccacatttggacctgagtacaccaggacttagccaaacttgccatgagctgagttctggtggcagatgggaactaatgaggacacactccactccagaatttcccagctgcttggcccctttttgtacaaacaaggtttggagcgaagtccggatcccaagagcatgttctgtaaatgtgctgtgcccaatggcttgggaaatgttctcacaaaattatgctgcttcaaggtatccttaagatttcacctattgtccagtttgtttgtatttttttttaactcaaaagagcttttattgctcttgccaaccagtttttagttttaaagtgaataggaatcaaacacaccccatcttttctcctgtgcctggcaatggtggtaaaggcattcccatcacaacatggagatttgtaagctccctacctcagggaccactgcacctcaggagaagcatgtctctttgcaacctatggatctcttcagctggtttgctgtcctgggactattgaggcagatgtaattgaatcagtttgaggcagctggagctggcatgtggtctctcagattgctagcacctgcttgtttttttgcaactcactagagtgagagaagtgccaaaaccagcattggtcttggagcagcagctacagctctccagatctcacatcccttccccttccagcctcgccacatcatcacggggcctgaattaataaaaccctttgcatgattaggtctgaggtagacctttccttctcattcttctcagtatgcagatcctgacagtactgaccacgagtccaaaaaaataaggccggataatggtgatcaggtggctgtggggctctcttatcattagacaactgggtagcctgtggtttgcacatttcaatgaatgtaccaaattcatttactgttccagcatagtcttattggcacagagaatgagcagttaatgtataacaaactgtgagctgttgtagaatatgataaatacacttccttagcaggggggaaataaaatggggctctttctccaatgtaagaactaaactaattgctgtggattgcttcaggactcactgtgtaccggatgttacagtgttctaaaggagagatttaaatcctaggatcccagtaggtgagctttattttaaaatatatacatttgtcatatttaaagttgtaaatctttttttccaatatatttgtataaccttaacttttctttgttgcatttaattattgtacaggaatgatctcactggatcctgatgttttatttgaattgagatgttataatgtatgtttatacatttctctaaaggaggtttattgttgatagtatttttagagcagctatgaaatagaatcatgacttactgtagggaaatgttatttcattatcatttggtaattaccacattgtaacacatagatgctagggagaaaaggatatgtgatgtggccttgaccaaaaggaacttgaagacaaataagtcagtcctttaaatgacaaaataaggcaggatcaatgtcaaatgaggttcttagaactgccgtgcccctttctcttctctgttgttcatggagtacatgccgagtccagtttggtcctctttgccaccaagccagattcctcctaaagagagcagagtactcaagcatcgccaactgatggaagctgtgtgtaacacaatacccgtgggcagttgctgggaaagcatggcatgagtaattgctaaagctagtctgtgggaacggagatctctgtgagtttgctagggagaatctagagttgagatggatcatgaataaaagcaatacattaggatgaattttctgagaccgagaaggtgaaacatcaagaagctagaaagtaatatatgcaaatgagcattgtgtgaatttattagcatagagaatgactatgagaaggccttagtcatacatgaatccttaactctgctagactatcaaatgtaacatggcatgttattcatcatacaacacgtcttcacagagattatctctgactcctcctatctatgttaggcctctcatatgacattttttatatagttttattcttttctcgaagtttttcaattcactggtctgagagtacagtcttaatgtcaggaatattcataaaggactttgttctcagtaagtttatataaaacagtattttaaaataaataaacaggtagttttaaaacataaaaaaatcactattcctttgttgtgccagggaaatgttagtgatcccccaaaacagacaggagccaatgtgttgtaactcacagcagggtctttattctattagagttagcttccccaacacaccaccatcatgcagggtggtttttgtggtggggagcccgaatgtctatcggggcaaggctttatagtaagcagcaagcagcgagtacatgtgcaagcatctaattggaaagctactgtggcctttcacataattggctggtgctgggagtcgtatcataaacttaacttctgctcctctctgcattggtggttgttaggcagggggtgggcttgtaaccttggtgcacatttgttggggaaatgacctggagacactggtcttgttgagggtgtaacctggaaacgctggtcttggggattagcctagagactggagctaggtttaggttttgttgggggcaacttggaaactaatgctaagtaccagcctgttagtttacctaagttcaaacttagatcaggcttgctaaaatggagtctgaattaaaaagatttggcctttcagtttgagggtaatttctgttctaactgtaatggccaagtttacttcaaaactctgacttaagggaagaagataacatagttcaataggaacagtgtagggactaggaattgaagatctgggtgtaaattctccgctgctacttgtctgctgtgatgctgggcagctctacgtgttctcagagatggagtctcctcatctataaaattgagttgcaacataccaaagtgctctgggatgcatgctcccacttgccatcgccttcataattctagttgttcacttagtgtggattgttttcttcgttatccctcctgcatttgtttactatacttgagaaccccatggtctatagtcacaagttaactgaactcataaagttttcaaagatcattgtttcagaaagaaataaaatttaaataaagtctttttgattagtaggtataatttttctacatatttagaatattttgagatatgatcagaaatttggcatttgctaataatacctgttaatataaagaaaactaacaatattcacagttttgtaaatatcttctttcaatatatctttgaccataaagttactgatactaatggctttatgtattatttgggcatctgagggacttccccagttctaatttctaataagaattgtgaataaatatttctttgggtaaaataaatgtcaagaaatttttttaccattttaatatttttaggttcataaaacaggtttgtaataggtcctgaattactaaatatacaacattggatctttaagttgtagctatatagtgctatatgtagctttatagtgctattgatatgtgtgtatatttacacatacatataaatgtgtaatatgtatatgtacatatatattacatatatatatatatatacatactgtaaataactaaattgaaaattggctacaaatgttttttatggtaccttaagcttatagagcaagcaggattgctgagtttcaacgttacttgggaaatagctcactgtgttcaactggagacatttcaaacatagcctttaatcatgttatgctgatgccccaggcaaagcaatgtatacttattagagtcattgcaagtgtcaggatagtatattccctaggccaaaagaaaattgatttttttctctgtaaatttgtcatttgaaatcatattcaaattttcgtcgatcaaaaaaaatgtgtatttgctttctaaatccagtcttcaacaacgtaagaaatttctcattagatggcagatgtgaattatttcctattaaataatttcaaggataatcatggtattgactatatggtatcatgaaataatctttatctattcacctcaaaatataacatagaatttaaaaatacaggcctgttcattttatatttttaaagtgatgaattactgttatacagactggattctccctgtcttgaaaaggtggtattatctttggccaaatacagggtagtgtattatttgttgggctgagttgctacagcaagcttttctccatgtattgttctgtacacttctgtggattagagactttggggtcatcatctgtatgtaagatgcttatgcttctacttttcttaggcttgtagactctaacgaccacatacgacatacctgagactggttatgtattgtcataaaacgtgtggcttaaaaccatagaaacatattctcttatagttcttgaggtcagaaatctgtatgattcatagattagatacaagattactaggagtagtgccttttcagagttctggtggccccagtttttttttttcttcttcttagatttttgtattgtttgcatatttatgtggtaatcccctctttgtctctatggctttctccttttcttataatgataccaattactggatttggattccaccctaaaacatgaatggttttctcatgattttatttccttactaactccagattttcttctttcggagattgagagtatgcacgtgaggttgagtgtcattgccttttgaaactacagagcaatctgatcattttattcagcatttcctaggattttaagaccatatgtacaagattcatactcccctagtgaccaggacaggtttatgtgtgcaggagagaattgcaaggcttagctcagttatgtcaccagtgaatgactgacagagttggagcagctcttggcccagcacagaaacctgtgtcctttctacttctcccaacttgagcctaataaaagaggtcattgttttctgtaagtaagtttcagactactcttagtatgaagatagtcggagacagcagggcacagtcccaggaatagctggaaatactactggaagcatttgttagcccttcctacttcataattggaacttttaagtccagaattttgaattttaattttttaaagcaattagtgacatgttatacaattattacctgtattaaccactgaacaaaatatcctagttggtgaactaatattcagtgcaagcatatttatagagtagaaaatttgatagctaagcattagacttccttgctagagggaaaaagataaaatgaaaatttgcatttataaatatcaaactattatttccactccaaacacattaatagagtgaacatactttattttgttatagaaccagagaaaatattaatttgctatgttatagttttctcattcctttttggagagtgttgattaaatgcagggcctcatacaagcactttcccagtaagttatatccctggccttggtttggggttgtgttgttgttgttatattgttgtgtttttttttaaagatagttattaaggttggttttgaacttttcacttttctgcctcaacttctcaaatagttgaaatgtcatgcttgtcaccaagtccagcttgagtgcagatttattcttggtataaattagacttgatccactttttgcagatgatatgatagtatatataagtgaccctaaaaattccaccagagaactcctaaacctgataaacagcttcggtgaagtagctggatataaaattaactcaaacaagtcaatggcctttctctacacaaagaataaacaggctgagaaagaaattagggaaacaacacccttctcaatagccacaaataatataaaatatctcggcgtgactctaacgaaggaagtgaaagatctgtatgataaaaacttcaagtccctgaagaaagaaattaaagaagatctcagaagatggaaagatctcccatgctcatggattggcaggaccaacattgtaaaaatggctatcttgccaaaagcaatctacagattcaatgcaatccccattaaaattccaactcaattcttcaacgaattagaaggagcaatttgcaaattcatctggaataacaaaaaaccgaggatagcaaaaactcttctcaaggataaaagaacctctggtggaatcaccatgcctgacctaaagctttactacagagcaattgtgataaaaactgcatggtactggtatagagacagacaagtggaccaatggaatagaattgaagacccagaaatgaacccacacacctatggtcacttgatcttcgacaagggagccaaaaccatccagtggaagaaagacagcattttcaacaattggtgctggcacaactggttgttatcatgtagaagaatgcgaatcgatccatacttatctccttgtactaaggtcaaatctaagtggatcaaggaacttcacataaaaccagagacactgaaacttatagaggagaaagtggggaaaagccttgaagatatgggcacaggggaaaaattcctgaacagaacagcaatggcttgtgctgtaagatcgagaattgacaaatgggacctaatgaaactccaaagtttctgcaaggcaaaagacactgtctataagacaaaaagaccaccaacagactgggaaaggatctttacctatcctaaatcagataggggactaatatccaacatatataaagaactcaagaaggtggacctcagaaaatcaaataacccccttaaaaaatggggctcagaactgaacaaagaattctcacctgaggaataccgaatggcagagaagcacctgaaaaaatgttcaacatccttaatcatcagggaaatgcaaatcaaaacaaccctgagattccacctcacaccagtgagaatggctaagatcaaaaattcaggtgacagcagatgctggcgaggatgtggagaaagaggaacactcctccattgttggtgggattgcaataggggactaatatccaacatatataaagaactcaagaaggtggacctcagaaaatcaaataacccccttaaaaaatggggctcagaactgaacaaagaattctcacctgaggaataccgaatggcagagaagcacctgaaaaaatgttcaacatccttaatcatcagggaaatgcaaatcaaaacaaccctgagattccacctcacaccagtgagaatggctaagatcaaaaattcaggtgacagcagatgctggcgaggatgtggagaaagaggaacactcctccattgttggtgggattgcaggcttgtacaaccactctggaaatcagtctggcggttcctcagaaaattggacatagtactaccggaggatccagcaatacctctcctgggcatatatccagaagaagccccaactggtaagaaggacacatgctccactatgttcatagcagccttatttataatagccagaaactggaaagaacccagatgcccctcaacagaggaatggatacagaaaatgtggtacatctacacaatggagtactactcagctattaaaaagaatgaatttatgaaattcctagccaaatggatggacctggagagcatcatcctgagtgaggtaacacaatcacaaaggaactcacacaatatgtactcactgataagtggatactagcccaaaacctaggatacccacaatataagatacaatttcctaaacacatgaaactcaagaaaaatgaagactgaagtgtggacactatgcccctccttagaagtgggaacaaaacacccaaggaaggagttacagaaacaaagtttggagctgagatgaaaggatggaccatgtagagactgccatatccagggatccaccccataatcagcatccaaacgctgacaccattgcatatactagcaagattttatcgaaaggacccagatgtagctgtctcttgtgagactatgccggggcctagcaaacacagaagtggatgctcacagtcagctaatgggatggatcacaggggctcccaatggaggagctagagaaagtatccaaggagctaaagggatcttcaaccctataggtggaacaacattatgaactaaccagtacccctgagctcttgactctagctgcatatgtatcaaaagatggcctagtcggccatcactggaaagagaggcccattggacacgcagactttgtgtgccccggtacaggggaacgccagggccaaagggggggagtgggtgggtaggggagtgggggtgggtgggtaaagggggacttttggttagcattggaaatgtaaatgagctaaatacctaataaaaatggaaaaaaaaaaaaaaaaattagacttgatcccaggcctcagacagaattccgaataagaaaaaaaagattccatgttttgcatctaatctatcatggtaactgtaatgggtatatatagactactaaactaataaacaggtaaataggatatatttgcaaagtcataggtagtattcccaatgggaaaaataggatagagaatggatgaagataggaagtggagtcatgagtagcttttcagaggacgtagcaaccaacctctacacaaaaataatgtaaaggagccagtcctgggaagaactacagaaatctgatgtctacagtgttacaggttttctaggactgtattgagtatgggagttagtgtagttgtagcaaggagggatgtcctggtattaatttgtctgtaagaagctattcaatcatttctttctccaaatttacaagatatattaattttgattttatgtgtttgagggtcttgtctgtatgtatatgctctgtggactgtgtcagaagaagctggtgagttctagtatcatgagaagagcagccagagctcttagctgctgggctatcttgccagcctgatcaattacctgaaagtaatattatcataatattatcatactttattttctttctctgcatttaaagactgaaaatagatagaaggtcaaatggaatagtcataggtgcttttatttttactattaatctcatgatagcccactgtttagcacagtttttttttttttttaggaacatatagttatctctccagtggagttgaatatatggaacttgttactgtcatctaaattttcatcttaaaacaaaaatgtgtacaaatgtttctatctcagtgaaattataactgtataagtagataaaagtatttggtaagaaactgatggcaagttattgttcactgagtttcatatctataatcaatgctgtgtgtacatcattattggttttgtattgctcagtggtatagcctgatatgtgcagtatgggacagagcagaagtaatgagtttgctgtgaaaatgtagagaacagattaaaacccagtccacaaatggttaagtttttagatgtcaatatatatatattttttactagagaaactaaagcacagtgcagtgttgaagaggctgaaaatatcccaatttgcaaaagaaactgtcctgtttaatatcagcattgttattggagaaaaccttaaccctactaaagaaattctcatgactcttcttgtctcatataagaaatctggaatgaaggaagagtatactgcttagttttccagaaatactataatacataattttcagtacagaataattatcatctaactcatacctgagataagagcctttaaagaaactgtccattcgtcgagagtgttaagtcaccatggacaaaggccattattatactgaagtctcgtgtatcacagtttaagaacaagatagagggtggttcttaagagttggaagcacgttctgtcctgttgtagactatggcttttctatgagtgctagtgaaagtacacacacggcttatagaccaatgctggcactttctttcttcatgatgtgcatgtatatgagagcatttatcagcatacagtcagaattaaccatgagctgtatctgtgggctggcaggccgggaagaatacagcacacactcctcagatcagtgttgtttggcaagtctcaccaccttggcagagctgaactgagacctagaggaagcagtactcatgcaggcagccatgtagcatttaaaataatatttaatttattcagtttgccacatttttcagcagctacattatttgcttttgttacaaaaacatggttacagtctgcacacaaaacactaaatagatacttgttcattttagtagatctagatactcaaaatggatatttaaattttcaatgtatttttctaccatctgtatcagattatgaactgctaaaagcagaaaccacagagtccttaggtaggttacagagtatcttgtcagctagtccagttggtctacagaagagggaagggccacagcaagctgagcacctcagtgtagccaggtgtgctgggagaaggtcagcagtgcgcggcccttttatggttttccttcagtttcctcatggcaccagacagtgttgcttactcctgctttctaaatgtgttcatatggtttaaaagggtgggggattcataaagtacacagagaaactaatggctatcaacctaccttattcatcaaagactgtagctcatctagtgttttactgaaatgaaatttaaaaatcaaaatggaatcaatgctcaaatattttgcttatttgtttttttttttaataaaagtactttcaaaagtaatgttctaagactggctttaatggtatatgcctttaattctagcactggggaggtagaaccaggcagacttgtgtgggttcaaggcaagtcttgtctctatatagcaagttacaagatatccaaagttacatggtgagatcctgtaaacagttaatagataaacaaataaaaaaacaagcactccacagctaaaaatctacgggaaaatcccatccatcataaaaccatcatggttttgtcctatagacagcatgttcctagcttcctacagcctcatcagtataaaggattagcagttatttatcttaccggaagaaagaaaattgtattacaccaatgtcttttgtgcaggttatatcagatttcatattttaaaaagttaattacaaatttagatttctttttttatgatctgagtgttaaatgtttaatatttttcactgagttttcattttattttttcattttttcaaaaagatctttaccaatttttatagcatatttgtatgttatcaaaagttaaattttgcaggtgcctgagtgaagctgggagctggcaaggtggtcttcccttgggaagagcacaccaaatggttgtccatgtcaagattttaagcctggaagcacacatgctagtaacattatgtggactctataagttatatttaggaatatatgtgtatataaatatgcatatatgcatgtgatacaatgagaaaagaggccataaatttaagaaggggtgggaagaatatgtgtgtgtgtgtgtgtgtgtgtgtgtgtgtgtgtgtgtgtgtgtgtgtgcgtgattgttggagagaggaaagtgaagggaaataaagtcataattaaataacaatctcaaatttttaagcacttagaaaaaatgaagttttgtgttcctagttttagttattaatttctttttgccctgtagtatttgcatacagtagtgctcactgctcatttactttgtgacttagaagaactcatatggagagaacttattcacatttttttatagcagatttgtggtgtaatcttttatttaatatttatattttgattcaactaaattttacattctgtgtactttcaaaatgcattaactcttgtttttgaatgaaagtagcagttttattttttcacttgaaatgaaaaaaaaatccttttttgttccataaactttttaggaagacagagttagcacaaaggcaaaaaaaaaaaaaaaatagtattatattgagaactggaatgttagaatttgcatgtctttctttagcagtcactgatgtctactgcttgtgacataggacttcccaagaaagtctctcgtttacaagaataaattattatattttgattgtctaagcaatgattaaatcagtgaaagcatcatagaataaatcaaacccctagtgagatacttttaacagcaaatacagttcatacggcaatgttaattttacttacttaagaaaagcactcatcaggaagaccctataactgaacaaatgaaataaaaatttgaacattgtaattttttgcaagacacaataaccaggtgataaataagtttatttgtgtcttaaagagttggcttcatgtagtcattattaaaaggcaatcttttcatatgatttttgtttaactttaaagggagcttagactaagaattctgatagcctgtgtctttacaatgttttattttttaaaaaagcagttacaaagttgaatgtttagcaataaaagaaccttatccggcttaacatgtatttgtaactgtttgatgacaagagaggtaaaggataaggtgtacaatccatgtcactaatttttcttttactttcaagttaagttttcattattatttttgtgtgtatgaatgttttgcctacatatacagctgtgtatcatgtgcacgtccagtacccacagagactagtaagggattttggtacccctgtacttggagttgtggatagttgtgagttgttatttgggtacgagggatcagtcttgagtcccctgagaaaatagccacttctcctcatttctgacctacctctttacctctatttttaatattattgagtcatatgtaaacatatataatcatatatatttttatattataccaataacaaactcaatgtaaaactatttgggaaattcaaaaagtaagaataagaagagtcaaggtatctttgatataattattaactattagaagaaagagttattaatatattggtgtttatttttaaaaccatgggccattgctcacaacatataatttattggttgtgatttttgttagctagcaatataattcaatcatgatttttctattaaataattttcccttgtctatttatgtattccataaatgtatactataccatcttgacaatcgattagttgtatacatgcaaattagttacttctaatttttctatgttgaaaatagaagaatatctttgtataggtacattaatggacaaccctgataaatgaatggttggtctgaaaattttagcctttgatgggtttagaaaggccatttgtgtgcatgcacacattgatggctggtcggtaccaaccctccttaaagggagctttctgctcatatcactattgtctgtgggtagaaaactctgtggcctggagaaagcactcagtggttgggggaagagggtagaaagtggccagaagtgaggtcatcaaaggtaatatttttgtttcaaaacttgttgcatgctgcgaaaggcttgaagtatgtccagcttacttcaaagctaacttgtggtttttttttttgttttgttttgttttgtttttttttttgtttgttttgtttttaagccccgagggagtgctcacttggcatggttgaatgtccctgttagctcagtcagtagcctgacccctccagcaccccggcttcttctgtgattgagaccacttagtcatactaatcattgcatgcagaaaatacataaaagatttgtattcatcactcaatatgttttgctgctcaagtgtcatgaaacattcagggtgtattaactggcagatgcacacctggagtatgttcttagctttagaaactgctaatttaaaaaaatcaaatatttaattttgagggaaaaatcagttttggattttgagcatatatatcatctttcattttggcccaattaacccagcaggtgtgtgtaaattaggtcactactttgtcaccgtggtaacatgcattggggaggtggatcttaaccacctccagcacaggtgatgttggctgagttagtattaagaggtgcttttaaaacaaacacagagaatttaatatgatagagtgggaaaaggtggtttgacactgggtactgacagtactctatgacacaaaaacaagtgctgcctgaaatctccattaacaagaaggtttaatgagcctgagaatcagaaatgttgtgtgaaacttactcagagtctctctgaaaggacagatgctatagtaccatgaggtgatgagtttgttgtttctcatgaaacaagggatttggggatcagttgtaaggcctctagaagttaaaactggtttcagaaataagtcttggttttgagaatgtctctgagtgtctggaatctagtcaaaacctagaggtgttgtttcggtttttgtttgcaacgagagggtctgattctttcttttgtgtgctctattttaatcaatattcatagttgctcatggggtaaagcattggcagagttggtctctgccagcaccccagcactgatactgtctctaactccggcgtcccaccaggtggaaaatcagacatgcctcaagatcgcatgtagtgcctgtgcaatctgtttggctgtcgaaggctccaaatcatgtgggcattctgcagccctacagagtgatagaatttcctcacttatcactgacaagttcacacctcttttggtcattaaaattgtaaatgtgtattatcaagatgctaaaagcaggctgatgatatacaacccacttctaaggaaatgtgtcttcctgggcagtttgagctcctgctcactgatgctgctgtccccacctgcctttgctgctccatatgttattttatagctttcagttgcccttctgtcctgcccaacgtttgtattacttattgtaattgaagcatttttattccattgatttttgataatatttttccagtggcatttaagaaacttgaattccctttgcgttttctttttttttttttaacttggttgtgaccacagcattattgcttattttgtatgttttcaatagttaatatttataaaacactgagcaaactctctgagattgctttctataatctccctttctgtgaatcaagaatgagagttactaagagaagagacacagcaagtcaccttctcagaatgttagtgtatttactaggtgggagagtcaagggtctgtgattttcaggtttgtttctctttttcattacccaagagccctgcaggcttggagactcacaaagggacaccagggctgagtgggggagcagttgcctcaagtgctctttacttagaagatgtcttgcatggacgtcctccttacgttcaagtcgtcttcccattaactccccagtggagttggaaaccatttattttgaagaaatgtttattacaaaaaagccctgaagtcttaaggaaatctattaacctggtaagataagaaagagcctgtattgtacacttaagaacagcctcccacattctaagacctggtccattcaggagaaaagtgaatgtcagtacaaatgattggaatggaaattttaccagagcaggatcccagcctgttccagacatgggataccaaacaaaatacaaggattgagttagcaaatctaataaaactaataaaggaacttatgatagaatcagggaacttggacccaaattgaggtaaccaagcagggggtggggtacagacatttgaagagaggagtttctttcattgtttgatgaaataatttttaccccctttaagtagcatgttaaaaaagaaagagaggttggtgtgactgagacaaagagctcacagtcacagaactggttggttttataccttcctttactgagcattgtccttcagtacaatgcagagccatttctttgttctcacaagctagcagttaaattgtatgtaaatgtatgcaaattagatgctgtctaataaagaaagtcattagatggaagaaatatttagtttagaaaaaaaagcaggtgtattgtgtaaaagaaaatgtaacactacaaaaaagcccaaaattctgtggacagttataggaaaaaattattaaaatagatttttaaagacttacgtcttcttgacctttcctttgtgcttatatatgtgtgcttgtttttaaaatatttacatataaaactagaggactggcttctttcccagaattactggaagcaccttcaccaggaacatttggacttgaataatctccacagcagcatttttccttgaattaaatgaaatgcagaatgaactattttcccaggaagaagctgctctttaggttgatacaggcctcatggtcttatgatagatgccttacaacaggccatgatagttattcttcgttcacctttgaggagtgagaattctatgtccattccagcctctgaaaaattccttaaaagatacttaaaccataaggttcttgtgagaagcctgcagttttcatgatcagtgctgtgttcagtatgtagtaagtacaatgacatgtactcactagacactactgttttgctttgagtgactaaatgttattcattttttgatcacacacatggttgtgggtgtcaaatacctttgtaatctcaggaatacaggtagtgaagcagccccccacccaggcttgtacgtagcacttgtatggtcaatgcttactggaaacagagagtctcgctattcagtttcctcaattcaactatgacaaaaatgtggtgtgctcatgacatgcatctctcaagtgatgtttgtggggtaagaacagacataactaaaagatctgtatatataaacgcttaatacagagaagactacaataaacagtacaagaaagatgaggcaggatctcaaagatggtttagaggacaggaggattgaactaaaagctagcaaagaacagttagtcaactatgatgcggtagagaaaagcaggcttgcaaaattctcaccttgcattcccaaattagtagaaatatagcaggttttcttctattttcttgtgaatttccaggaacagcttgactttaacctctgtggaaatacaaatgagaaccatgatggatacaataattaccaaagtaaaattataattctaactcatatttataatcatattcagtcattgactgagaaacaaggaaagttaagcaaaaagacttcatagtttttttgatttgaagtcattataaatataaaatttattactcaatctatgattctgtccatggtgtgaaatgtgttttggtagtgccaggcttagggatgcctcaattatgactactagcatctagttgacagaatatttgttaagctgttatcttattacaatggcagcccttgagctatcatactccatgttcctcccatactccattaatacgagggagtaaggttatgaacactaaatctctttgctgaggtcacaaagtacatggccctaccagatttccctggtaagttgtctagttctttctcatttgaacagaagcagcatctatcttcaattctgattttatctcctagggtttggttttccttggatttggtgtcttattctcatttttgtcccactgtcatatccatggaatatcaacgattgagtagagggagtcatagatgggaaaaaaaatcgaacattttggcaactgagaatgaaactagaaaccatatgggcttgtggactgaaagaatttgaatatgcttccttgactttagaattaaagaacagatttcaatgtggaggtacaagatgtgttgcattgaactaatcttggaggtaaccaaagggctgagggactaacagcttctgatattacttagtgcttattattgttattattattatttctttttaattatgcaaagtgctaatcagtttgattatgcacagtgctaatcaggttaattatgcaaagtgctaatcagttcttcttgaagcacacgaggagagcagaggtgctggcggtgaatggcgtagctagatgggggtagtcacggcagtcattccttattaagataggagtagacaagatagcaaatgggatttatctatgaaagtgaagagaaaaagaaagagaactatgggcacattaaagattatagtttggccaggacagtgtttatgcatagaaagatttccacccagttgtatactttgactggatattctgctatattatgaaggcagtcatttgaagccagaacgaatgcagagggaaagaaacagagtattgtatagctagacaagttgtcaaaacaacttactgtagttggcaagcgccaagtcctgggaggacagtaagggaagtgggatctaatagacctatacatgaaagagggcatcaataaagagaattgtaaaattaaggcagtgtcatttggagaagataaacagggccacctcactactgcatcattattaggttggccatctgtgcagcatatttcctgaggtgaactgagagctggcttcgtggtgctggccttcctctgtggagagtggtgatgatgggtgtgacaataagggttttatgtaatagctcctcgttggaccagctttgttgccgctgaaatcaaagtaaattttaatattaactttcgggtctgtgcttattaagctgggtaacttcctgtgaagatgagtttataaaaatatgctcatatgctttcatagaacagtgaccagagagttcccttaggaaaggcctctttattcagtcctgttctattctatggtttgataagctattgataaaatgctgtaatacctgtttgattgacctcaaaaaaatatttcagaatgctaagtgaatattcattttttaaagaaatgttcccagcctatgtgactcttccctgggtctagaatttgagctggagatttaaaatatttgcagagagcagggtctaatttcccaatgactatctgacagtattttcttttccaaacacatgtctaagcatgaatcatcttcacaaatgccttctgtgagcgggatttgtgtaggtccaaacagtggtaagagtcctatagagacagagtcactagcgaaggagcctccagcctagggcatattaatgacttatttgtccagccagcgtggattctttgataaaaataaactttcaatttttattttttctttaacctggaccaatttccttttcaaatatgaagagagtgacataaatctttggtttccaaggagagtctggaaagaaatagattgttagaggacagtgcccacaaattgagaaagcccgttgggggcccttcgggaatttggctaggaaaaatctgtaataagcaggccttctgctctgcttcatgggaagttggttttagaaatgaaacattgcttatgttttctccaccttaaaacagataaagatgtaatattcatattagcactttattaaaatattttgaagcactttttaataaatgtaacaaaaattttttgtagtgattgtaactaaagggctccttgtaaattggtctctgtgacagtatactaatcccttgattccttctgaggcatttgaagccaacaccattgctacatagacatttataattccataagaaagtctcaaggagaagtgatatgattcaaatggcaaatgaaaatttactaaaagaactaatatggccaaagtgctaattaattatgtatttatactcacagcacagacgtgcttgcacatatagacctactcattccttcattaaaattggtgttctaccagttactgatttgctaaaaatgtatgcactgtgctagttactatacctgcagttctcctcagtactggagacacttggcctaaagcaatacaagtactttgcaagatggtgcttagagataagattaaatggtgttttcctcatggtcttcaactcgcagagatagatcattagaggacagtacccacagatttagaaaatcatttgggaacaaaacttttatgtttttttctggttttataatttttcttttataagaaactgtatgaaatcaactacttgatcccaatattcaattatgtaaaaatcaagactttgatctttttgcaaatatgtaatttgttgttgttaattctatggatatacccggtgccctaggtagggtttctattgatataacaaaacaccatgaccaaaaatagcaagttacacagaagagagttttgtttggcttacacttccacagcatagttcatattgaaggaggtcaggacaggaactcaaacaggaaaggaacctggagaaggaactgatgaagccatggaagagtgttgcatactggcttgttccacatggcttgctcagcctgctttcttatagaacccaggaccaccagcctagggatagcaccacctacaatgggctggaccctcctccattgatcactaattaagaaaatgccttgtatctggatcttttggaggcattttctcaattgaccttccctcctttcagataactctagtttatttcaagttgacacaaaactttccatcacacctgccttgggtttaagttaaattcaatttatatgggatgaactttggaatattcttgaatttcattcagtactggatttcccagttactggctgaggaagccatgatgtattcagttgtacttgctcatactttctccctccaagtttggttctgggtgtagttgaactaaaccatgtaaaccatagcactcagtgctcagtggctcctgggaagcctgtggctccagtcagtcctttatttctgacaactgtgtcctccttagctctgccacccgaatactgggtgctaatgcagttcctttctactagtctactttgtgttttcttatgttgttgtttcatttttcattaagcttgtattaaactcccaattttctctttccttatacctttcttgttcttcttatacccttggccactcccctacttagttaaattttggttacttatatttattggatataatatacttttagttgtagcaataagagtgtgcacacctgtgatgaagccaattagatagaaatgtcttgtcctcctcagagctgcaacatagctgtttgctgttttatctccttacttacactgggaaggttttgggagtgaaagtaacactctgaattcttatatatccagtatctatcctggactccgccaataggcattcctcactcagtctagccaagaaattttaaagcaacaaatccatgatctgtttgttaatgagtaaagtattgagaaagtgaagttgtcagtaaagcttcatgaagaaacattatgaaggtatcttaacacaagtagtgcttggatttgacctttcaaacataaccttagcttttaattgtgggaaatgagcgaaaagatgaaccccagaccgtgaacaggagaacacacacacacacacacacacacacacacacaaaaaagactaatgcagaggagaagttgactgacagctggacaatatgtgaaccaggacagacaggagaatgaatgggtagattatgtgcttgatacaaggacctatgaattctttaaaatcttgtggttacatagttccatcttttcaaaatatggatgtatttgtgacaaggggaacattgtggggcttgtgagatagctcagcaaggaaaggtgcttgtcaacaaggctcatgacttgaggtccacccgtaggatcctcaaggtggcgaggaccaaccatatgccatgccatgcagacatgtagacagaagggcaggcacacagacagacagttgaagatgagaaaaatatattttttttaacaactattatctgaaaagataaaaattgaagaataacaatgttgttctgtccagagaagataaaacctatctacagataggcataaacttatgactaaaactaagaaaacagagatgctaaatgattaattttatagagctctgcatctgaaatataaatatagatatacttgtgaagaaaacaggagaccctagatccccacgatttgtctacactgttggaggttgattaccatcagaagctagctaactgaaaatgaaataaagtgtaggtagcactagggtgaagttgagagggagatctcaccattagtttgtaaagcttgaggtttgcatacatgactataacaagactgaccaacaacactgacatttcatgtgatttagttaatgtgtctgggaacttggtagcagcccagcatcgatatcaaagactgatgatttcctaacatgcactgcatattttattttgcactacacatttttatgcagtacattttatctaacatcaagtttccattttggaatatttcttctttaaaaatattttggctttctagaatgaatattgttcttatacttgcattttcttaatgtcttcaaaaaggaattctgaatgggtaaggctacatcaagcatatggctactcaaagattagaaaagctgtggccaccacaaataaatattggtaacaactctgatggaacatgtgtggtttattatgagaaaagaaaaagacttgcaaggaacttaaataagaaagtaagcctgctgataaacaaaaatacaaaccaatgtatctgctagtgaactggtggtcttgtctgcttgcttccacttaatagaaaccacttttataagatacagttttaatatcatcaccagtattgactttaacattatttcaaagaagcttctatagcaatcaaatattttaaatcaataaaatatatgattatgataatgcattactggtaacaaatttttccattatatagagaagcaacaatatgtctcgatacagaatcccatggtctagaaattctgtttggattctttgcttctgttttcagctttagctttctaccctgtaggagtgtgggtaaacattagaaccatcagcaaaaccagctggtcttgcctctgccttacccttccttgtattctgaagccactgcatatgatattcacagtctttgagtaggaatcaggttgggattttattttagcattctgttgtaaagtagaaaaacacagacaagtgaagttcaggtagagatcagttttaacagctatccatctttgagtatttgagaagacatgcaaaaggcactttctatgatcctgtaactgaaacatgacagtacacctgcactgcagtaggagaggtgtgaaaattctatgaacaattaggtgacggggactctgcaaaactcatttataatttttatgttgactataggtctatgagttctgatatagaactcccctttttagaaggaatttgaagaaaataaatagttaagatttagctaaagatgatggaaagaaaatagcccagatgctaagatggaaatcatgaacaggaaatgaaaagcttaggccttacttaatagttatgctggttagtctttgtcagcttgatacaaataagagttatctgggatgagagaacctcagttaaggaattgcctgtaccacattgcctttggggcatagttttgagcattttcttgattagtaagtgatgtgtaaggcctagcacactgttgggagtggttggtatatagaaagcaggcagagcaagacatgcagaggaaggtcctctgtgctctctgctttagttcctacccccagggcccctgccttgaattcccttgctggtgacttttaacatgtaagtcacacaaactttccccataattagttttggccatgctatctaccactgcagtgaaaaacttaattaagacaaaggtgaagggaatctgtgatgtaagggagggtaaatgaaaggcaatttgttaccctcaattaaaaaaaatcttgccaatattgagaaaattctctaacaaatcttttgcattgagtagatctcctgacaagccagtcttggaggcagaatctggaggaaatggggtggtcattttcttctccattacacatttatacagtattccagtgggtccagaactgtggacttaaaataccttttcttatgacacctacatcactctagtaacattttctgttgaatcatgtctctagaaaagatggagacttggtagtagttcccgagaaccagcttgggtacacattagaaggagaagaatccatggtatgatagggatatttaatcacaatacttttgtcagtgggatattttggctgaataaaggtgactgtcaagaaaatgaggctggttatctacagtgtctcatttcgtaggttccctgttcttcctggcaacgtttctgtattgagttgccactcttacagtgaaaactaattaaaccagcataagcatattttactataaaaactgatgaattctagtggtacaacctaatgaaagataataattggtttatttcaaatgttttcagtttgtggtgttgagttccattgatcacatgtaacaagcgcaaaggaagattctgagcatggtaaagggctgatgtttgcactctgcttgtttggacatcctttagcacgactctttttatctgtttattgacagtactctttagacctttgtaaaaattataatgtacacaccaccagcatatatttggttgtataatgagagtaggtttttagtaaatgtagccagaaggaaatataaaaattcattgcactagttttaatgctttgggtaaaataggtttgttctatgaaccttgaattacataagacagagtgctgtgtttaggagacataaaagcagattaaaagtcaagagaagcagcatagcttctccttggagagtgcttgcctcactctcggctggaggaagaagcaggttttactcccattctccctgctccgaagctgagaagtgtcagttgtggttacttggagaattttggcaatgatacacaattttccttgaggaaaataaaaatagatgtcatatactggaattggtcacattacttttctttccgttttccttaatgagttttctccttccactcccagcaactgtagcttctttgggtttagcttagacagtgggaagaatacagttactgagtctgagtggataccacttatttgtctacttatggtcactcgttgaagacatgacactggccccaacttaactaaacaaagatattcaggacaggtggcatggactgtgtctgtgtgctgtgaagggttccaagcatactggtgtaacccatgtatctacaaaggaaccttctgcacataactaaaactaacccttatgggaatttgaggagcccagccttctggctagagaagtctttttgttcccctgtggctgatagctgtgtttgaaatgcccagatagatgttgggtggtctagattactgcacagtgaggcagtaaacagcctggccttgtctgttaatcccctcactttcctctaaccacttacctcccaaaatggaggccaaatgcatcatatcagtaagcttgctgaaaccatgtcacttgcaggcagaaaggagctcctactcttactagacaatccccactgatggtggtggttgtctttactgtttggtcctcagggacaatctgggaattatgttttaaacatcgttttcttctctccttctactaatccagtacacttaaaaatgtcctcgtcctccctccggaactggttttgctcttgttaaagggcatattctcatggtctattgtatcttcctctggttttcactaggaaatgtttaaggtacattcatgactcttcttgtgtacatctgtgatgtgtttcacatacagtattgatcagagtatttaggggaaaggaaccattagtatccatgcatatatagaaagaatataagagaaaattggtcacatgattgtggagtctgtttatgccaaggttcacagacagcatactgaggtcctagctgaaccaaagatagaggtttcatccttgtctagaggtctggggcatggcagatctgataggattactatagtctgatggccagcagactcaagattcaggaagtaccagtgttacagtttgagtcaggaggagaaatttcctcacacttacaggaatgtcacctttttattctgtttgtgcttttaattgactggatagggtccaccatttaatcctgacaaaaacacaagtcataacactgtgaagaagattctattgcctactctcactaagtcatatgattgtatatatggtttctatcaaataaataatctatctttactactgatggtgatggactgcttaacggtaggcatgtagttaaactcattttactcaggtaacactgcataaggcccatgtcaaactctaagctactatctgcagggtattcgctcgacttctgcagataacacaagctggacaaaagtttcttatgtaaaataatgtagtgtttgtatataacctatacacatcttaaatatttaaaatcatttttaggttcttttgaatatctaattcagcataaatactatataaattttgttttactcaattgtttaatggtgaccaaaatgtgaatgctcatcaggtaaacattgagaactatttttgatcaatgaccatatgaatatttgaatgcagaacccaaggatagcaatagctgacaagtcattttaataattaaatgaaacaatttgtataaaattcttacttaacaaaatagcttattatttaggtacacaaaaaattaaggtccataatggtaagatttgttcccaagaccacacagtggatggtaaaaatgaggtttgagcttaggttttcttctaaagtcagatgtttcgtcattcttctcttttaacccctagaggggaccattataatgtagtgagtgagcctgtcacattagccttcatgtgctaaaatcctcaagctcacacttgccgaaaggctttagagaaggtatgtaacttctttgttcatgtgattcttcatcgttaaagtaggactagcatctttcatagagtaacagagggtagattgtttctagaaatatgcctttatctgtgacttttaagtgatggaattccagacccaaaaatgttgtcagagatgtttctacatttgccctcaaattatgatatttgccatttggatttaggggtgatataggaaataattggaaatactcaaaaaacattaagaattttaatggtacagataactttctattgtaacagatttgtaaacagttttgagagaattaaaaatcatgggatttgttcagaatatttatgtatctatgaaatgaaattttatagataaggtaagaggaactcatagataagaggaaccttttagagaattattgctgtgcctgtacaatggggttatgatggaagattttcctctttactgcgtaagaagataaatttagaatgctacaatttgtcaaccaaaaacagctgaaaaggtacgaggcacgaagaactactttcctacatgtgcacttggttttagacaaatatatctgcttgaagttctgaccaccatgggaaaaggtaccatggaaatcattgctgtaggagcctggaagtgttggctcagtgcttcatccccgtgtgacggattagatgccacacacttccctttgctgtgctctttcacccagtttgcaataaacatgattttttaggaagggccgaatcttactagtgtttgtaagagataaaggagaggctgggtttcagttagccattatggaacacaagtccaagagaaaatcatatcgcttttctttcctcaacatttttttcctcaacaattttatatccactgaataatactaaaaatagcatgaagggtcagcttcttagagaaccaaaaagttcatatttaggctaaagggaatatggcaacagaggaattgctggaaatttgtaagacaaatgggtattatgttaccttttgcactctgagataatcatcaatttcttgtaaattttaacatatagtaatagctgtacattcatcttctctaccaattgaattatctataggccacttgcctcctaaaagttggagtcttttcagaataggcaacaattatgaatattattatgtgagaactattggaaacagataaaaattgtatactaaatgtccgatggattatgatatctctcccataaaagatagcagctacttatcctatcactttactttgagggatttataaagctttccttttcactttttggcaattggcatgagcattactcagaggaaaaaaataattaccaggaagccaagacctagaaaggttgttccttcagtaaagcccttagtttgtagacctggagatcttagttcagatttccagctctcatagaaactccagccatagttgtgaatgcctgtattgccaggacagaggacgtagagacaagaggatactgaggtggttgctagccatccaatctagctaaattggtgagctccatatttattaagaaatccttttactaaaaatataaagagggaagtgattgagaaaaatattaaactttacatacatgtttgtacacatacatgtacactttacaagcagttatgcatatctttacacatactcataaaaacagttttcaaataaatcaaataggaatcaagaaggaaaataaaagtgatcctgaatttttttttgctttgactaaatacataaggcaaatgaggtatactgcaataagaaatgagaaatacagatgctcaagcagattatggttgaattccagggaatttgacagaatgggtagctggagccagtgttagagacaggtttgtggggatggcagtagactgacagcctgctgctgtgtagctctgtcagggtcagggtaccattggaaaaggacgatgaaacagttctcgatgtgataatgaggtttttcaagttcatttttaaaatttacttattttttttaattttgttttaattacagtctggttgtccccccccccccttacaggctacccactgactgttcctcattccatacctcctcccctgacttcaagaggatatccccacttcccaacccccaccctatcagacttccccactccctgcaacttctctcactgagtccataccaggcaggcagtcctctgtatgtgtgtcaggggcctcatatcagctgatgtatgttggtattttttcacggcaatgagtcaaaaaataacacacaagataaagtcacatgagcaagtaccccagcaagctagctataatgtaatgagttatattttgatgtatgatgatttgaacaattatggctgatataagctcatgtaattgaatacttggtccatagttggtagaactatatgagaaggttaggaggtatggcctagttggaggaggtgtgtcattggggtcaagttttggggtttcaaatgacttagagtgttcccatagtcatactctctgccttctacctgtagtacaagaagtaagctctcagctgttcctgctaccttgctccaacatcatgaacatctggaaacttaagccaaattattttatacattgccttggttctggtatcttatcatagcaatagaaagtaatttagacaaaatggtattaatttgagcttctctgttagttgtagctacaagctactttgagtagtgcaggtgagcaccaagagtgtatttttgcaaggtaagaagtaagaagaatgactaaaatatgtaaggcatctttcagaatctattgcgggaattttctcaaaacttactcagtgatctaggtaattgttatcacctattttatggatatggctcaattaattgttaatcttgcatttttctgcagtttccccatgtattgtaaataatctgggttgttgggtggtctgtagactagggaactaatagcaaacagtactcacagattcacagccataccttgtcactactatacagtcacactcctccagactcacagaaaacacatttgttttgtaaaacaagggccttctttcaatactccatacacaggatgtgatgaataaatctttgctaaacaggcgcatgcttttgtaaaaaggatccgtattttagattcactcatacatgaccgaatcaagactttcctttccctctaaggggaaagtatcatccgatgtttccagcgcacaaacaacctgttccagactagttcagacaggctactgatgaatgaatggttgttctctgattatttatttagaaaaaatattgatacatgcagcatttgccatggcttcaggtcagatctaggctctggagatagacatggcattaaacaagacacagttctgtttacatagactcacacactggttcttagaaatataacttttagaattgtgtctaacacataacatagatccatattttccaagcagtattcttacagagtggccctattattttcaaagatgttcattcattcagagctcacagcttcttgactaaacaaaattcgtgtggaaggacttggtaagagaaatgcactgccttacatatattctcattgcatttcattaatcttcctgggcacctacttaaaaacagaatcctctttctacttgctttcatctttgctgtatggccatggcaagctaaggtcatgtgatcttcagctaaaaataatgaagatatgataatatcctaattctcacagagtacagcataacttagtaaattaatgtttgcacagtgcttagaaattctgaggtttaaaattgctaagagaaatgtacagaactattattgctactaaaattatgatagacaatttcttctctaccaaaaataagacttcagtgtgttggtttcaaatctgtaaaattccacaattatgagagctttatgccacagtaaaataaaaagatattctgtatatatctaaatgaaaactaataacattattatatgattaaaacgttgccaaggtatcactatttggggaaggtaaatggcatttaagaccttatgattcactagtctggacagatggatgcttacatcttgctatgtaagtggcaggtggtgccccaagtgtaatgggttccaaagttctcatatttgattcttctcattagctagtgtttggcttggggcagtaacaactcactttcattttaaggataagaagaactagttgatgggagagtgaagggttggtttggggtatgtggtgctgctgttggctctttagttactctcatccatgctttagcctgactacagggttacagggcaggccagaaatgtttcagatcaagaagctgtgacttcagaacaggtctgaatgtactcttcctggaactgacttcttcacacagctttccataccatccagagtgctaaggctcatcactgtgctccttagaggactttacactagaaactttaagggagaataaattaccactattttatccacttaatcaatttatagggagcaccaaccacccattccatctcctaaggatgcttcagaatactcacaaacttggcgtccatagcctctattttagtaaacaagaaaaatgatagatactgaacataaaattttagcaaagaacaaagtcatgaaagaaacaaaataaagtcatttaggttggagatggcaaccttttaagatatgtagatacaatggttgaaggagaacaacatattcttttttttttttccattttttattaggtatttaactcatttacatttccaatgctataccaaaagtcccccatatccacccacccccactcccctgcccacccactccccctttttggccctggtattcccctgtactggggcatataaagtttgcaagtccaatgggcctctctttccagtgatggccgactaggccatcttttgatatatatgcagctagagtcaagagctccggggtactggttagctcatgttgttccacctatagggttgcagatccctttagctccttggctactttctctagctcctccattgggagccctatgatccatccattagctgactgtgagcatccacttctgtgtttgctgggccccggcatagtctcacaagagacagctacatctgcgtcctttcaataaaatcttgctagtgtatgcaatggtgtcagcgtttggatgctgattatggggtggatccctggcacatattcttaaaatgtgacttccacttcacatgtctctcatgatatttgtgattttagcaatagcataaaaagtatgaacattttcagtcagttgtcacaggactctgtattgtgacaggacaattcagagtgctactaagagagactgccccaagatagccagcttggccagaaagtttgaagaggaccacttgggcctcagctcagtttttttgttttttgttttttgttttttgttttttgttttttgttttgtttttttgttttgtttttttgttttgtttttttttggttttttgagacagggtttctctgtatagccctggatgacctggaactcactttgtagaccagactggcctcgaactcagaaatgctcttgcctcccaagtgctgggattaaaggcatgcgccaccactgcccagcttcagctcaggattcgtattctgcttaataaaagcgtttaataattgaggcagaactcgaggaccgttttattagaattttaaagaaaaacgccatggcaggtaaactgcctgaagaaggaagacggagaagaaaacagaggaagacttgttggttgctgcggtgtggtagagtgctgctaggggtatagcttcagagggaagaaggggggaagtgtagtgtgctagaggaccctgaactcctaagagaaaagagacggacataaacaagacagttccttttctcaggagaaaacatggctgtatggcagtagctctcattactccaggaggcatgcagtttctgggaaggaaaaggatatttatctcattaaagtgatgatttttcttcctatctctttctatatttacaggtgaaagtttccttctgagtggcagccttcttcccggaagattggcagcctagcccttcttatagctgttctgttggacaggccattagctgtcgaaaatggttttgttttgttttttgtttgtttgtttgtttgttttgttttttttgtgatttttgaggcagggtttctctgtatagccctggctgtcctggaactctctctgtagaccaggctggcatcaaactcagaaatccacctgcctctgcctcccaagtgctggattaaaggcgtgcgccaccactgcccagccaaaaatgggttaattcttaaaggtagagacaatggtatgggagctcagtctttatagatagtcagaatgtcaagtctcctgcacaaannnnnnnnnnnnnnnnnnnnnnnnnnnnnnnnnnnnnnnnnnnnnnnnnnnnnnnnnnnnnnnnnnnnnnnnnnnnnnnnnnnnnnnnnnnnnnnnnnnnnnnnnnnnnnnnnnnnnnnnnnnnnnnnnnnnnnnnnnnnnnnnnnnnnnnnnnnnnnnnnnnnnnnnnnnnnnnnnnnnnnnnnnnnnnnnnnnnnnnnnnnnnnnnnnnnnnnnnnnnnnnnnnnnnnnnnnnnnnnnnnnnnnnnnnnnnnnnnnnnnnnnnnnnnnnnnnnnnnnnnnnnnnnnnnnnnnnnnnnnnnnnnnnnnnnnnnnnnnnnnnnnnnnnnnnnnnnnnnnnnnnnnnnnnnnnnnnnnnnnnnnnnnnnnnnnnnnnnnnnnnnnnnnnnnnnnnnnnnnnnnnnnnnnnnnnnnnnnnnnnnnnnnnnnnnnnnnnnnnnnnnnnnnnnnnnnnnnnnnnnnnnnnnnnnnnnnnnnnnnnnnnnnnnnnnnnnnnnnnnnnnnnnnnnnnnnnnnnnnnnnnnnnnnnnnnnnnnnnnnnnnnnnnnnnnnnnnnnnnnnnnnnnnnnnnnnnnnnnnnnnnnnnnnnnnnnnnnnnnnnnnnnnnnnnnnnnnnnnnnnnnnnnnnnnnnnnnnnnnnnnnnnnnnnnnnnnnnnnnnnnnnnnnnnnnnnnnnnnnnnnnnnntctttttctttagctactttgtatgttctttctttttttttgtagaacatgattttaatattttcacctgttaatattcaacaaatagaataattattttaagatatatttcgttggtattgtctccattttcattactgattttattaatttggatattgtctctgtgctctctggtaagtctggctaagggtttatctatcttgttgattttctcaaagaaccagctcctggttttgttgattctttgtacagatttttttgtttctatttgttttacttcagccctgagtatgattatttcctgtggtctacttctcttgagtgtatttgcttcgttttgttctagagctttccggtgtgctgtcaagctgctagtgtaagctctctccagtttctttttggaggcacttagagctgtgagttttcttcttaccactgctttcattgtgtcccatatgttttggtgtaatgtgtcttcattttcattaaattctaaagaccctttaacttctttctttctttcttccttccttggccaaattatagttgagtagagccttattcagcttccatgtgtgtgtgtgtgtgtgtgtgtgtgtgtgnnnnnnnnnnnnnnnnnnnntgtgtgtgtgtgtgtgtgtgtgtgtgtgtgtgtgtgtgtgtgtgctttccctttatttttgttggtatttagtaccagccttcgtctgtggtgatctatggggattattttagtcttgttgtatctgttgacatgtgttttctgaccaattatatggtcagttttgcagaaggtaccatgaggttctaagaagaaggtatattcttttgctttaggatgaaatgttcagtagatatctgttaaatccatttgtttcataacttctgttagtttcgctgtgtctctgtttagtttatgtttcattgctgagagtgctgagagtggggtgttgaagtctcccactattattgtgtgtggtgcaatgcacgctttgagctttagtaaggttttttttttttttttggaaggtgggtgtgcttgcatttgtagcataaatgttcagaattgtgagttcatcttgctagattttttcctttgaccattatgaggtgtctttccttattttttgataacttttggttgaagttgattttattcgatattagaatgggtactccagcttgtttcttgggaccatttgcttggaaaattgttttacattttactctgagggagtgtctgcctttgtcactgaagtgcgtttcctgtgtatagcaaattgcttggttctctttatgtatccagtctgttcgtctatgtcttttaattggggaattgagttcattgatgctaagagatattaaggaaaagtgattgttacttcctgttacttttgttgttagaggtggaattatgtttgtgtagttatcttcttttgggtttgttgaaagattactttcttgctttttctagggtgtagtttcccttcttgtgttggagttttccatctattatcctttggatttatggaaagatattgtgtaaatttggttttgtcatggaatatcttgttttctctgtctgtggtaattgagagtttcactgggtaaagtaacctgggcaggcatttgtagtctcttaggttctatatgacatctgcccaggatcttctatctttcatagtctctggtgaggagtctggtgtaattctaataggtctgcctttatatgtttcttgatcttttcccttgactgcttttaatattctttgtttagtgcatttagtgttttgattattatgtggcaggaggaatttcttttctggtccagtctatttggggttctgtaggcttcttgtatgttcatgggcatcgattttttagattagggaaaggctggtactaaataccaacaaaaacttctataattttgttgaagatatttactggccctttaagttcggaatcattttttttttcttctgtacctattatccttattttgttgggtcttctcattgtgtcctggatttcctggatgttttgggttaggagctttttggattttgcattgtctttgactgttgtgtcaatgttttctatggaatcttctgcacctgagattctttcttctatctcctgtattctgttgctgatgcttgcatctatgactctgaatgtctttcctaggttttctaactccagggttgtctccctttctgatttctttattgtctctgttttcatttttaggacttggattgttttgttcattatttttcttgtttgattgtgttttcctgtaattctttaaggacttttgtgtttcctctttaagggcttctacctgccctcactatatctgactggagcctgtcctttctgtgatcctggttgtgtcagagttcctcagcattcagctgtctctgtgatcctatgattctgggattctatgatcctgagatcctgggtgtgtcacagttcctgggagtcaagctgcccctgggaccctgagatcctggtatggctaagctcttgggatcttacgatcctgagatcctgtggtcctgggtgtgtcagagcgcctggaagtggagcttcttctgggtgttgtgggactggaggtggagtttgagtccatggtatgctcagggcgctggctcagaccaggaggaggaacctgtgccactggtttggtggagttcctcggtgcctgggttccactggtcccagttacttccagtgttggggtagatgttgtatcctcctcacctctaatcctatctgtaggttctttcttccatctttctcctttttttttccatttttcaaccccctcacagtaaataagagacaaaaatagatagagaggaaggcgagagatccctgaataaagtcaggggtcagaaaaggggctgatgttacagttagactacttcctgctgattaggggtgtagttaagttccaaagtcacagagtctcagactctctgctgctggcaaaatcataaccctgctagatcatgaggtaaatcatagtcagctgctgtggtcaatctgaattggccaatatcccacacctggaagtatatatttataatatttccatgtgtttatttttttgaaaccaaaaagtcaaaattgtccctgcaccttttcccctgctctcccctcttgcttaccctcctgtctccccacatagtatagatagtctggtcgtgtcccccctgggctctccaagaggtcgctgcctttggctatactgtcccacgtatctatcataaatactcttctccactacatctaagggcagtcatttcctttcttcttgatatttttccccattcatctggtgcccaaaccatttaccagccatcatgtcttccctcccaacccccaccccacattcactcacacctcccctcccatccagaaccagccctttcctgtctcttattagaaaacatgctttcaagagttaatataaccagataaagcaaaacctaatacctcagaaaaggacaaagcaaacacaaggaaaagagactaagaagaggcaccagaaacagatatataggtagagacccatttgttcacaagtgcaggaatctaataaaaacagtaaactggaagccataatatacatccaaagacctgtaaggtaaaaagagaaaaaacgtaaatataaattaaatttaagacaataaaaaaacattaaaaaaaaaaaaaaaaagaagaagcagccctgaccttgacctgagaccggcagccttcagagatgctgctgagttcactttctgtaagcagtctattcctggacatccagcccaccctcgatcctagtgaaactcccttgaagaaaaatcgattttttatttgtaagtggttattaattggatataacttctgggttagggatgagtcatgagcctgtttctcctttcagctctaggaccccatctaatgcagacctgtgcaggccctatgcatacagcctcagtctttgtgagttcatatgttagtctgtcctgttgatttagagggccttgtgtccttggtggcctctatctcctttggcatgtaaatactttctgcctcctcttttgaagagttccctgctccctgagtggagggatttcatggagacattcctttagagatgactatcccaacgtctttcattattggtataatgtctgtctagctgtgattctctatatttttcttagctgctgcaggaggaagcttttctgatgaccagtgagtacctcactgatttttgagggtatcaaactgtctttaggagccatggcatgttattgattttgttttcaaagaccagaactatttgggtttcccctgagtccattgactgtctatctagtaacaagttcttggttacccaggcagtgttgagtgtgggttccatcttgtggaatggacattaagtcagatcatacaagctttgtgccaccaatatatcttgcaggcagaacaccgttgtagatcaaagggttttttttttccttagaaaaatttaaacctcacttttaaaacctccttttttttcctacctcctcagtggaggcttatagccaattactttgtacaataatcagatcttaattttgttggagtttgtgaatggcatgtaaatgttaataataacatataaactatatgaattataattgtagaacacaaatatggcttacgcctttgacttctgtcatctgccaggattatttgaagtcttagttttgaaaagagacatgcagagcagtgagaagagctgtgtcacgctgtgtcactgccattgtgaggtagtctgtagatggtgtatggattcctttgctagtcaccctgtgcctttacagaagcgactggactgcagtcattcattgaggatcatctttgcttagagcttgtcacaagctatagtatagagtcttagatagcaatgctaaggagggccctgaaaagtagctccaaactagtgaaacaaggtataagcggccgcccatttctctctgaagttaccaacttactctagaaacgtgcatggacttagaaacaaaagtaaagtttttatacccaaattttaccatctactccttcaaattaatggtaaaaagtataacaggaaaggtgaacgatgttggggttggagagaaggaagaggaggtaggagaagacagaagcagggaattaaaggaggagccgaagacaggaagaagagtcgaggtgtgtcttagaaacccatggattttctatttttaaaaataccagtttctctcataccatcttccaagtttgaaattgactggtttactgtaagaagcatttagtaaatgcaatttttatttttaataactaaggctcaaatttcatgtgagatctcacaccagccctccaatgtaattaagtttatggttttctcaagcacttcaaagacttgtgatgtgctgttaacaacaatttttttttcctggataaggagtaggacatcacagcagtcatactgtagctggctgctgtctctcagggaagcaagcgccaccaagtgatgccaggtacttgaggtttggctgtcatttgtctcagaagactcaggacaaagaagactgttttacctggaagtctgaagtgataagatgttggtgtttgtattttaataaaaaatgtaaagcaaagcctgtgtctgcaggctggggatggcatttacactgcacaggtattgcagagggctcagagtggtgttatggcagggatgtaccctggacatcagtctgggagctcctgagggaaactggtgtcccatgattctgtctagcatcacacacacacacacacacacacacacacacaccctcacacgcagaggctgcaggtgctccttttttattgcatgatgtaaagagaaaatgtaaaatggacaagcttcccacaatcatgttctcttcatcaagctgttattgttattttagtgagtccactaaaaagaattatctggagcgtcttgtctttgcttctttgtgtacttgatgaatatgattaccgttttacctcctgtatttaaacccctctgcctaatcccacattctgtctaaaagccatgtctgagagcgagcgcttgtcccccttcctgtaatagagttttagagagataagactgcagctaagcaggtgcagtaaatgcatttgggtcgttttcactgtcttgtgcaagtacaaagtcgacaacataatttaactaagattaatagagaccattagtaaaataaatttgttttatgaatgaaaatctcacactaatttggcatagcctttttttttgacaaatgcactatattcacttatgtagcacatcattatatgcctaggaaccaaataaacatttgtcaggctcctttctgaattttctgttaactgtcttctaattttttcatgtggcctgtgaagggaatcagattttacttttaaatgtaacaaaacattggcctggtaccacaaggtccagtgattgttttcagaatctcaagatagcttcacttaattttcttctagaattgttcttattcttatatttcttttcactttagagtttaaagcatcctattcaaaatggccaccatagaggggaggagggagcgaagggaaataataaagaacagtggcaaccgagttggtgctgtataaataagcacatttgctgtgtctctcttgtgcagtttttatgtcccactgatgagagaactggtttgagatgtaaattgcttccctttgattgaaccagggaggagatgtcatgtaactcatctcatcagcatagagcagtgtgcgcctttggtgacttataggctagcagggctagagagaattcctcacctctttctgcagctctgttccggggtttagtaaccaccaacgggaaggtctccccacctacccgactgccttcatcattttagctcctctgtgcctaccctgtccttaaataatttttcaaagatcactggaaagtaccactggtttatttgcagtaaataacgtgcaaatgaaaattaggttgtggggaggggttttgttgctgctgttaatttgttttaggtagagatcacttaaaagattgctttggaaaaatgagaaaagtgatgaagaaatgatttccaggaagtatttaccatggtgtctggctatctgtgttcagaacaaacctgcagggatggggagccacagagaaagcaggctctctgcatggtgggcaggcagcagaggatcaggcagcataggaagtccttctgatagcctccagaatacatgctgcgtgaacgaagaattgggaaaagggtcttaaaacaaaagaggtgaaaagaagtctgcagtctagctgcccaagaagcttagcaagccaggcacttgtgtgtgtgtgtgtgtgcgcacgcgtgtgtgcgtgtgtgtgtgtgtgtgtgtgtgtgcgtgtgcgtgtgtgtgtgcgtgtgcgtgtgtgtgtgtgtgtgtgtgtgtgtgtgtgtgtatgtgtaacaaattcaggacagatatcacagccctatcaggacagcaaggccttttcttcctcctcttctattaaatctacattttgaaggtggatggtgctgactcataaattaaattggagtaatacatacagtgtatatatatttctgtcactttgtctcaaattaaacacgaaccttctcccctgacaagatgatagaaaagttaattgctcgccctggctttaaattggaatttgaatttgcaaaatgctaaaggtttatgagatctaaatcatgaggagcttaaattacattcctgtgataaaatattaataaatcaattaaaacataagccgagtataatattactttttttgtgggaaccttgaacacaataattcattagggtgtagtgcagtaacaattattgtatctttttttaattttctttttattagttttttttgataaatacatcatcagataacattccacatggtagattatcatcccccaatgcagcatctagaaatcgctgtacccctaaacaagagctacgctctaaattatctgctgttagttatccttgttagcatcagctgcttcttttactgaaggggtattttcctcttgggaacatctgttcaatgccagctctaccattttgtggtttcttaatctctcctctaaagatgggcacaatcacactaatactatctcagcactggcatgcagaaccaatcagacatgtagacatccttcacgcatgctgaagcaccagctaatgttgtttattattattattattgttgttgttgttggctaggaattttgtatctctagaagggctcttaaatatcatttagtaatcaaccccctcattttaaatatgaaaaatcagaaatccagagaggtgaagtcattttggtaagccacacagctacacaaggaaattgtagaaattaaaatcaagagtcgccaggcagtggtggcacacgcctttaagcacttgggaggtagaggcaggcagatttctgagttcgaggtctgcctggtctacagagtggacagccagggctacatggagaaaccctgtctcaaaaataaaataaaataaaataaaataaaataaaataaaataaaataaaataaaataaaatcaagagtcaaaaactcgtaactcagggcatttcctagattgtattccagtgctccacacctctttaaaaatactagaatgtttacagcaagcttgatgtgccattctatccacaactgtttctgtctgtaacctagtggtgtgtgtgtgtgtgtgtgtgtgtgtgtgtgtgtgtgtgtgtgtgtgtgtttggatttgattttatcttattttaatcattagtcatttcaggcataattctctgaaaggcctggtggcacaagcacgtcttcccacagctgtcaggaagggactcatttacctaaggagagaattccttctcctgctgctccccaaatgaagactcagcagtcaccttccttcctacagggttttggaggaggccacagaagagaggcggcctttgttcttaagtaattctctcatgtaatgatggaggaggatcccagattcccaattttatctcttcacagtcttcctgctctctacccctcaccttggtttttctgacccctgttcctccctcgtgttccagggtccgctgtgacttgctttttacttattatgaaaacaaagagaaccattggtataatacaaattggatctacctcaaataattgaaactcaagctcaaaaggctgacagccaagcagagggtaaggttgagtgtgtctgtgtttgttctgctggccagggattggatggcctggcagtgactccattcagttttgtttcctgtagcctttcccatcaacagtaacaatatccacatccatatatactcgtattttgaagatgtatgtaagaaatgttaacggttaatgaatcataaagcactatataagaactatataaaagcactctctgatgttcttccaaggtataaagtctctaatgtccattgaggtagaaatcagtagaatcagattgttgaaattatgtggttactagggggaaacaattaaaaattagaaacaaaagtatttagaaagtcaaatgtctgtggtaccattttttaacaaagcatcctggttagaaatgagtaacggcattaggagctcccacagattgttctgcagtgtctcagtttctaaacctacattaggaatgtaagacaaccaagctgcattgaaggaaacaattgagtctttttgaaatccaggaactataatactatgtgaccctcctatgcagtatgtttgattttgtgatccatttattgaaaccacatcatctgccagattctatatagatttaatctaatattttcttcctgacattacttgttcacctcaggaatatttaacaaggaacacaagacccaagactgagagctagtattcagactttctttctgactcccagactgctctctctcttcacgattactctgtgaaatccttcatagaagacttaagcagtgcaagttacaacaaatgggacagagggtctgtgcaaacacaccagagaaaaaggaacagggagagaaattgtttcttctaaaggattcactgagaacagtctcatattgtgttggatacacttctctggactcctctattattttatagtatcctagagtcttagttaaggtttctattgctgtgcttatacaccatgaccacacccatggcaactcttataagggaaaacatttactatgggctggcttacaattcagaggtttagatcattatcagcgtgatggaaagcatggtgctggagggttacctgacagttctacatatcgatccacaggcagcataagtagactgccacactagggctggcttgagcatgtaagaccttaaagcctacctctgcactcatatgcttcctccaacaaagccacgcctactccaacaaggccacacctcctaataatgccactcgctatgggccaaacacatacatgagtctatgtggtcattcctattcaaaccatcacacacagtattttctatggttcagcttttattagtcctgattctgttccgctttacaaataactttccatacatttcttcattgtgtactcacagaaaacttatatgtgaacttaagcagagaaagaaagtagtacccctcctgttttacagactagagaaatgagttcctgtagattagattatttgccagaacaatctttgtttagtgacagaaagagctcagtatcccagaactttttatttattttattaggtatttatttcatttgcatttctaaatgctatcccaaaagtccccccatgctcccccacccactccccccaccctcccactcccacttcttggctctggcgttccctgtactgaggcagataaagtttgcacgaccaatgggcctctctttccactgatggctgactaggccatcttctgattcatatgcagctagagacacgagctccaggggggtactggttagttcatattgttgttccacctatagggttgcagatccctttagctccttgggtactttctctagctcctccattgggggccctgtgatccatccaatagctgactgtgagcatccacttctgtgtttgccaggccccggcatagtctcacaagagacagctctatcagggtcctttcagcaaaatcttgctagtgtatgcaatggtgttattttaaaaatagttttggaggcagggagcacagagagtgttgttgataccttcctcagttaagtgctgctttatgtttggactcagggtatcacagggacctagagctcaccaaaccaggcaaggtgagggatctttttgacacctttgtttccagccatcggattatataaacacttaacacgtgctcgcttcgccagcacatagactaaaattggaaagatacagagaagattagcatggcccctggtcaaggatgacacgcgaattcgtgaagcattccatatttttatttgaaatgtaaatgaagaagatatctaataaaaaattaaaaaaaaaacaaaacaaaactgcttaacaccttgccaggcgcatggatcctgggagagaactcaggtccatgtgtatacatgacaaacactttaccaatgaaatcctcgcctgaaccacttgccacacagagcatacttttgcaagatcaactcagtgaattatttgaaaaaatataaaatcatattaaacctttccagtttaatgttttaaagaatttttgagcatagggcctaaagagagaattcagtggttaagagcactgacttatttcagagggcctagggccaactcccagcccctacgtggcagctcacaactgtctgtgactccaattttaggagatttgacagtcttttttggcttctgcaggtatcaggcacacatgtgatgagcggatatatattcaggcaaaacactcacacacgggctgaagagatggctcagcagttaagagcactgactgctcttccgaaggtcctgagttcaaattccagcaaccacatggtgactcacaaccatccataatgagatctgatgccctcttctgaggtgtctgaagacagctacagtgcacttacctataataaataaataaatattaaaaaaaaaaagttaggacacaacttagccgggccgtggtggagcacaactttaatcccagcacttgggaggcagaggcaggcggatttctgagttcaagaccagcctggtctacaaagtgagttccagaatagccagggctataaagagaaaccctgtctcgaaaaaacaaacaaaaaaaccactcacacacatagaaaagtaaatacatgtttaaacagttaattaggaaggttattaatatggaatgctttattctcctattataagaaaaagaaatggggtagccaatctagagagttaggcactgaaggctgttttgcatctgaggtgactctctagatactgattgacaatccccatctcctttgctatttgtgcttctagaaacacagcctggttttctagcatcatctggaagcctggtatagcagtggttttaaagaatctcctgattaaatgcagatatgtttatgaaaacagtggtacagggttccaggaatgtggatgctacagttgacaagaaatggccaaatacttagttgagaaaagggttggagaaagaccaataattaaaattgtgttttttaccaattaagaggaaataaaataaacaggaaatgtcattcttttcatctcttcctgtgtaacaatcaaacaaaaatgagacatatccaaactttttttatttggaagacaggcaaaatcaaaaagcataaaccatatactactttgttgctctcttccccctccctctccttaccttccccttcctcgcctcccaccccatgctcctcttcctccctctccttctttggtacagcattgatagagttaattcattgtataaaagaaatagaatggaacctcttttggatctccacacagcttaaaagaaggcttaagtaacattaaatagagatagtccacatgtatagcaggaaacagtgcagaacataatgcaggttttgtgtagtggcatagaaatagaagacattgtggtctcttaaaattgaaaggtcaaaagttaggtatgcagaatcagagagatggtgacaacaaacagaaatgaagctggctgagagaaataagaaatagaagaggaagcaaagctattaccagagccaaattgaatagtaggaacaaagagttggggaaggaggaagatacttcaaacatatactagaattatgatgagaaaatcatttaagttttaaaatgtatggaaatgtggcttagtgatagggcatttggctaccatggcaagtccgtgggttcagtctccagcactagtttatttattcagtcccagcaatactgccaagaataaactctttcaattaagtttattttttaaagaaacattatagaatttacagtgaaatgagaacatgtgaatatagataaaataccgttcagaatccataaagttagctagtctgactactagaaaaaattaaaatgaatgcattacattcaactcagcaagatgggtgcaggaaaaaataacaagaatctgcaaaacaggaaggagaattttgttaaaataattttgtaaattataaataagaaaattaaagaggatacattaataattcagaatttattttctttttaagagaataaaaagctaaacaatctagtatcagttgacaattactaaattataaaaaacacctacaaatacataaaagtaaaaagagagtggagaattaactcaagaaatgaattaagtttaagcttaatataacattttctttagattaagttaaaactttcagtttaaattcagataagtgaatttacataaataaaaatcaccaaagagctacaaaataagtaagaaattcatgttgaagaactaccaccaaatatatatgtacctgtatatatacatactatggcatgtacgtgtgtgcatatgtgtgtgagtgagtgtgaaaagagtgagctgtccttcacagctccctttaggatgcagtgtcattacacatagaacaatatggtcttcttcctacctgtttgttttgctcatggttgtgacagtggcagagcccgttttctgctaactatatgagcattgttatatagaggaggtttggaggctctcgcctagtgtttgctaggttagaggaggaagtgattatcagtaccagctatggtcgtgcataaatttcttgatcattaagttttgtttaatttagaagaacataatctataacctagagataactactgtctttgaaaactaccatagtgtgaaatataaaattatacttttacttaatgataaacattgtcttctttgagtggcacttaaaattgagaaaatatttaaaaccgaccatacttgtataactcagcatatttatgttagctataattaagaaataaagaacaagccatacagtagtggctcacaccttcaatcccagcactggtgtgtcagtgataggtggatttctgagttcaaggccagcatgggctacagagtaagacccaggatagccagggttacacaaagaaaccctgtcttgaaaaacaaaacaaaataaagcaaaacaaacaaacaaaaagaacaaataacaaaaattagtttatacagtcatgagtaagataagtggtttgcctttattttcaattttagaagcattttggttatatctaatcatggttaaggataaaatatgtccaagatattgtttatgttcaaaatattgaactagtttctttgtagtcagttttattttgaatatataaacagttgtatagaaataaattatataaagtttcaaagattgcttaagttgaatatgcaggacaaaacctcagggtcttatacttaaagggaatattgatttatgttaaattttaaaggaattgattagattatccatgttgcctggttaacacagcagtcttgtgctcttgccacagattgcctttaaaaaaacgcagtgagggttttcctagggagccagtgcctctgagttcttatgacacatgtatttttttaacatcaaatttaatattttgacaacatatgaaccacatgcgagtactttgtctacaggttttctgttgggcaggtgccatctgtggttgtgaagccaagtgttcttctggggcagaataatcgaatcagagttaatggggtgaccatctaagcagggctctttgtcattaaggtccactcttgtgatagtagcacattatcccactgattggatttgtaggaaggcatccacctgtggcccatgttggcagacaagagactgactgcagaggcagccccggcgaaggagaagcagggggtagctgtcctgggcagcagaggctttggctggaaagccacacttgcaggatggcttaagcaatacaagtaggtgcgtgactcccatggtatttggttcatgtaggtcccaaaataaagcaaccaaaagcagagggttagattctgtggcattggaaaggaaggatttatcttgaacaagtgaaaagcaaaagcctggggagacccacagccagctgatgagacaagatttaagcacatggagccctttacctccatctcagggatgattttctgtttggatgagagctattgtaagaatttccatgtctgttgggggcactgaagttctcacagactatggtaaacacaatttggctcacacgctctcataatcaggctgacttgcagtgaaacagagagtgctctatagctgtgccaggcctctagcagtaccaactgttaaataataaacaggccctgtttgttggcagcctcttcccctcctgccaacacggagtgcccattttctgggtttacctgcccgcatgtgttcagacactcagaacagtgtgtgtgttgtgtgaggcagtgatggcgtgaacaaatcagtctacatctaatctgcttagtttattattccctcaggacatcgggtaagctagcagacatgcagggcttgggcagcacaaacaatggccgtgctgttgttctagataatgttacaggctttgaagagggcactagctaattgtttttcttacgtttattttctcttcctgttctttttgtattggtttggtggagtatggattagggaaaatgagaatgaatctgccaatgagatactttacctcaggaagttagaaagtatctgggctggttatgttatttcactggcaagatgtctttgtttaatgtgcattgagtagtgagtcattctggaagtactttctcaagtcccacaaggtacagataaccccagagaagatgcccacacttggctcagtgggtgtgtcacactataactaaagcatcaaagtccatggtgaggtcagacttcttccctataccatcactaagtgctatggaagggcagtgtaagtaagatccagttggaagcagtatccacctagtctccttcatgctccaaccaccacctccctttctctgaaggaaagattcctacatgtcctctatacagtcactgtgatgttcttctcccaggaaaagtcccttgataatgttagttttacaatgctgctttggccaaatgaatttcatatgtttcacagatgtagtgctcaaaaatagactcttaaaattcccacaccctcttcaaccccagcaaagccacgatgctcatcgctaggagtaagctttgtatgtttaggcctaagtgacacatttaagtggagttcctaagcagcatgaagggtaactatgaagcaaaagatattcattcattcattcatttcccccccccccaaccgcctttcttctttctcataagttaagtgaaaagaaagaccttaactttcttctaatggcaatatcattatgaaaaatagcctttgttagacgtttctattataatccatttgtttaaaattgtcattcacattcccttgtaatgatggttcccacatgatgaagctcttcgttgattgggagagcaaaaccatttgcttgcatgaaatgaaatttcattctcagatcactaaatacgggctacactgtggagtaatcattcagtctttttgactaggatatttttagatcaaaagtaaatagttggatgacaggctctggtgacagcacagtctgtggaggttcagagtgttgggctgtgatatccaacccagtcttctctggatttatccctcaacagtatgcagtggaagctaacttttatttcttttcattaaaaactcaaggacctcttttctcactatcttttgaaaaagaccttgctaattcagcctaaaacttgtagttctccttaaatttacatttattttgagaattaatttttaaaatcttaccagtatattctcagtactaggctggaaccctgagcctcttgcatgcagagctcttcctgtgagttatctctcctccctatattcggtctgctcttgaccatggtgacctatacagcattcacctggaatggttcaaagaatggcacaaaattcatagggaaatagttaattaaggaagggggagggcaagcctagaccccctaactgaggagcttttgtccttaatggcttccagcacatggggagtcagttttcactaaagatgtggcttctgacttgtgggcctgtgaatggcctgacaaccctgagtatgtgggcggcatgaattggataaggcgaggtagttataaatgcatatttgagaaaaatgaatcaaacttggaagggtttggggaagtatggtttggatctgggtggatcaaaaagcattgtagaaaattattaatgaattaataaaaatatttgtgaagtgagtggcactctatgacaaggaattgggtttactgttaggttactattagtaagtggcactctacggcaatgagttgggtttactgttagtttgctattagtaagtggcactctatggcaatgagttgggtatactgttactttcctgctgtagcttcattcttcttgtgataatgttttcaaaagtgtcatccaatcaaattagggccagattaatttgtctttatataaatcaatgttttattcttttctacttggccttccaacctacaggcctcagaactccaccaaacccctgaatgggagtagtccctaatagagtacttctccagccccaagctcaggagcgttcctgagttccaatgtctaatttgctgtgaacagaaagggagatgccacaagtttttcggatcgtctctcaatgaataaataaggtcaaagaacagcgtttgtgttgtgatcggatatgtaggcatgcatgtttgtaggtacacatgcccctaccactatttgttctactctatgatatgtttgatatagaacacatttcacacttgtctgttctgtgcttgtagaactgccaatctatagttaaggtaacaactgttcctagtggtttagttgctcaaattcatgaaaatcagactggctatttcttttttcccccatttattttatttatttatttatttatttatttatttttatgtataatttttctcatgtgtttatttccttaagcacctatataaacacccatgtatctagaagtcatatagttttttatatacatttccactgggcccttacttcctagagtcagcatttaagcagctgtggaataataaaatacattctcttattgctcattaggaaaaaatgtttactacctgatttagtgattttataagattatttttggtatactgaatagaaaaaccatacatggttacagttggctttgggtgttgggaaaacaggattgctggaacagcacttaaataaaaggaatagtgctgacctacttagagaaattaattatgaaagaaaaataatggattatagtagcagataatggttctggggctgctgctggttgaaatccatcctgaggcttatttataattggcacaattagagttttcgagaattgagcagccttgatttatttacaagggttcacgcaggacttgagtcagggggaatgaaagggaccgaggtagagaaagggtttactgctttaaacgtcagttctgtagaatttcaaattcagatggcagggtaggtagaacataccatctccagagatataatgtcatgttcttaaatgccaggagattttaaaaatttgggttctttcttgaagaactagtcttcatagtagatctgataaaaagctgaattgtactttgaacttaagaacattttgctttctaggattctgtgaactaattttctataatatgcagtttcgtacttgttcatttgtttgtcagatatttagtgtgtgtcagatcctgttctatacacttgcaatctgtagtaacaaatcaactgtgttatttactaagaaacgataagagtatgatttatttgtaagccataaaaaagaacaaatgaataggctacattttatcatcattaaaatttgtatatttgaaaatattattaatataataaaaaataaaatacatgctgtacaaaaatatttgcaaagagtttattcgagaacttttcaaaatgcagtacattaagaaaatacatactgtgctcaacagtcaatagattttgatcacaaaagatattaacacatagaaatatgctcaagtttagcatctattagataaattgcatgctaaaggcttgagacactgctacacatgttttgaagtgtttgaaattaagaagagtgaccataccaggtgtttgtgagaatgtggaaaatctgtcaaaaagtaaaattatctggaaatagtttgatatctttctctaataaaaaatggaaaaaaaacataaataaaaaaatcaaacatacatttattgggtaatctggcattttctgctatgaaagagcaaggaaagtaaatgtttttattagaattatacacagatgtttctaacagctttgtttatatgagataaaaaaattaaacaacctatatgaccattcaaagaaagagataaacaaactttaatgtaaacgattaccacaaaataacaaattgggctgaattattgctacatggataattctcaaaataatatatggagtataggaaagcaaagtaagttcacattgcctgatactatttatatattcagttttagggtaatgaatgataataactccacactttttaggggtgatgagtaactgttatttcattgcggtgctggcttcaagggctaatcaatgtgtcaaagcatctaaaattttatacttgaactctgtgatttaatctttatcaagtttaccttacaacactgttttttaaggggaaagagaaggggggaagagatgtaaattatatccaagaaatgacaagtagcaaatccacatagtacattaggtactagtctggaaatgttcatagtgtcccctttattgctgaaataattccatccatgtacagtttccttggggcacttcctcatctatgacaactactttccatgcctctataccctcatgcccgagagcaggtggggaatcctacatttactctatttctttctccacttgtgcaattatatttaagagccagagagactgaaggaagtgggatttgaagtgcagtagaaaactatttgctctgaaaattaagaagtctatgaagatagccttaacctttgcagcattggaagaccctgaccactttggatccctgaacacattactttctccaatacctgtagtctatttctgaagttaccatatcctttccaccttggactgtctctaagtactactgccttctcacttttttcccttttttggtttttcgagacaggatttctctgtgtagccctggctgtcctggaactcactttgtagaccaggctgacctcaaactcagaaatccacctgcctctgcctcccaagtgctgggattaaaggtgtgcgccaccaagcctggcacgtttttttccttgaatgaccattatcccttccaaactaacctatgtgccaagttaaactcttcctctcaagtaaagtcttccctttaggattgccatgtaaatgttcataaggtgcttccttctcagcatctgcttgggcccacatgcacctgttccttagtctttgatcttccttggaagtatgtatttgatctctttcctctctatatatcaaagctatatccatagttcagagagccatctagttttacctaaatttttgcaatagtcactttttattcttcatattaatcttgcaacccagtcaccgtctcttccagaatgactcatgtctttccctcatagcagcttaaaaatatttggatatttttaaacattcttcattttcatttcttcccctttgtgttcacttctctgaagtaaaacaatttataaagttaatgttacaactaattttctctgagatgcctttattgatttcctaactaattaaattttcttacattgcacttctgtagatgtaagctttatttattcgtttacttatgatacagtcttctaactctcaagttagcctcagacttgctgtgtagttgaggaaaaccatgagagtctgattctcttcattctgtatcccaagttttggagttgccattatgccaatttgtgtgactctgggtttcatgcccagggctttgtgattggtaggtgtgttttaccaactaagccacatttccagcccaatatggtttattttcactggtcactttacctaacactgtttttttttttttttccattttttattaggtatttagctcatttacatttccaatgnnnnnnnnnnnnnnnnnnnnnnnnnnnnnnnnnnnnnnnnnnnnnnnnnnnnnnnnnnnnnnnnnnnnnnnnnnnnnnnnnnnnnnnnnnnnnnnnnnnnnnnnnnnnnnnnnnnnnnnnnnnnnnnnnnnnnnnnnnnnnnnnnnnnnnnnnnnnnnnnnnnnnnnnnnnnnnnnnnnnnnnnnnnnnnnnnnnnnnnnnnnnnnnnnnnnnnnnnnnnnnnnnnnnnnnnnnnnnnnnnnnnnnnnnnnnnnnnnnnnnnnnnnnnnnnnnnnnnnnnnnnnnnnnnnnnnnnnnnnnnnnnnnnnnnnnnnnnnnnnnnnnnnnnnnnnnnnnnnnnnnnnnnnnnnnnnnnnnnnnnnnnnnnnnnnnnnnnnnnnnnnnnnnnnnnnnnnnnnnnnnnnnnnnnnnnnnnnnnnnnnnnnnnnnnnnnnnnnnnnnnnnnnnnnnnnnnnnnnnnnnnnnnnnnnnnnnnnnnnnnnnnnnnnnnnnnnnnnnnnnnnnnnnnnnnnnnnnnnnnnnnnnnnnnnnnnnnnnnnnnnnnnnnnnnnnnnnnnnnnnnnnnnnnnnnnnnnnnnnnnnnnnnnnnnnnnnnnnnnnnnnnnnnnnnnnnnnnnnnnnnnnnnnnnnnnnnnnnnnnnnnnnnnnnnnnnnnnnnnnnnnnnnnnnnnnnnnnnnnnnnnnnnnnnnnnnnnnnnnnnnnnnnnnnnnnnnnnnnnnnnnnnnnnnnnnnnnnnnnnnnnnnnnnnnnnnnnnnnnnnnnnnnnnnnnnnnnnnnnnnnnnnnnnnnnnnnnnnnnnnnnnnnnnnnnnnnnnnnnnnnnnnnnnnnnnnnnnnnnnnnnnnnnnnnnnnnnnnnnnnnnnnnnnnnnnnnnnnnnnnnnnnnnnnnnnnnnnnnnnnnnnnnnnnnnnnnnnnnnnnnnnnnnnnnnnnnnnnnnnnnnnnnnnnnnnnnnnnnnnnnnnnnnnnnnnnnnnnnnnnnnnnnnnnnnnnnnnnnnnnnnnnnnnnnnnnnnnnnnnnnnnnnnnnnnnnnnnnnnnnnnnnnnnnnnnnnnnnnnnnnnnnnnnnnnnnnnnnnnnnnnnnnnnnnnnnnnnnnnnnnnnnnnnnnnnnnnnnnnnnnnnnnnnnnnnnnnnnnnnnnnnnnnnnnnnnnnnnnnnnnnnnnnnnnnnnnnnnnnnnnnnnnnnnnnnnnnnnnnnnnnnnnnnnnnnnnnnnnnnnnnnnnnnnnnnnnnnnnnnnnnnnnnnnnnnnnnnnnnnnnnnnnnnnnnnnnnnnnnnnnnnnnnnnnnnnnnnnnnnnnnnnnnnnnnnnnnnnnnnnnnnnnnnnnnnnnnnnnnnnnnnnnnnnnnnnnnnnnnnnnnnnnnnnnnnnnnnnnnnnnnnnnnnnnnnnnnnnnnnnnnnnnnnnnnnnnnnnnnnnnnnnnnnnnnnnnnnnnnnnnnnnnnnnnnnnnnnnnnnnnnnnnnnnnnnnnnnnnnnnnnnnnnnnnnnnnnnnnnnnnnnnnnnnnnnnnnnnnnnnnnnnnnnnnnnnnnnnnnnnnnnnnnnnnnnnnnnnnnnnnnnnnnnnnnnnnnnnnnnnnnnnnnnnnnnnnnnnnnnnnnnnnnnnnnnnnnnnnnnnnnnnnnnnnnnnnnnnnnnnnnnnnnnnnnnnnnnnnnnnnnnnnnnnnnnnnnnnnnnnnnnnnnnnnnnnnnnnnnnnnnnnnnnnnnnnnnnnnnnnnnnnnnnnnnnnnnnnnnnnnnnnnnnnnnnnnnnnnnnnnnnnnnnnnnnnnnnnnnnnnnnnnnnnnnnnnnnnnnnnnnnnnnnnnnnnnnnnnnnnnnnnnnnnnnnnnnnnnnnnnnnnnnnnnnnnnnnnnnnnnnnnnnnnnnnnnnnnnnnnnnnnnnnnnnnnnnnnnnnnnnnnnnnnnnnnnnnnnnnnnnnnnnnnnnnnnnnnnnnnnnnnnnnnnnnnnnnnnnnnnnnnnnnnnnnnnnnnnnnnnnnnnnnnnnnnnnnnnnnnnnnnnnnnnnnnnnnnnnnnnnnnnnnnnnnnnnnnnnnnnnnnnnnnnnnnnnnnnnnnnnnnnnnnnnnnnnnnnnnnnnnnnnnnnnnnnnnnnnnnnnnnnnnnnnnnnnnnnnnnnnnnnnnnnnnnnnnnnnnnnnnnnnnnnnnnnnnnnnnnnnnnnnnnnnnnnnnnnnnnnnnnnnnnnnnnnnnnnnnnnnnnnnnnnnnnnnnnnnnnnnnnnnnnnnnnnnnnnnnnnnnnnnnnnnnnnnnnnnnnnnnnnnnnnnnnnnnnnnnnnnnnnnnnnnnnnnnnnnnnnnnnnnnnnnnnnnnnnnnnnnnnnnnnnnnnnnnnnnnnnnnnnnnnnnnnnnnnnnnnnnnnnnnnnnnnnnnnnnnnnnnnnnnnnnnnnnnnnnnnnnnnnnnnnnnnnnnnnnnnnnnnnnnnnnnnnnnnnnnnnnnnnnnnnnnnnnnnnnnnnnnnnnnnnnnnnnnnnnnnnnnnnnnnnnnnnnnnnnnnnnnnnnnnnnnnnnnnnnnnnnnnnnnnnnnnnnnnnnnnnnnnnnnnnnnnnnnnnnnnnnnnnnnnnnnnnnnnnnnnnnnnnnnnnnnnnnnnnnnnnnnnnnnnnnnnnnnnnnnnnnnnnnnnnnnnnnnnnnnnnnnnnnnnnnnnnnnnnnnnnnnnnnnnnnnnnnnnnnnnnnnnnnnnnnnnnnnnnnnnnnnnnnnnnnnnnnnnnnnnnnnnnnnnnnnnnnnnnnnnnnnnnnnnnnnnnnnnnnnnnnnnnnnnnnnnnnnnnnnnnnnnnnnnnnnnnnnnnnnnnnnnnnnnnnnnnnnnnnnnnnnnnnnnnnnnnnnnnnnnnnnnnnnnnnnnnnnnnnnnnnnnnnnnnnnnnnnnnnnnnnnnnnnnnnnnnnnnnnnnnnnnnnnnnnnnnnnnnnnnnnnnnnnnnnnnnnnnnnnnnnnnnnnnnnnnnnnnnnnnnnnnnnnnnnnnnnnnnnnnnnnnnnnnnnnnnnnnnnnnnnnnnnnnnnnnnnnnnnnnnnnnnnnnnnnnnnnnnnnnnnnnnnnnnnnnnnnnnnnnnnnnnnnnnnnnnnnnnnnnnnnnnnnnnnnnnnnnnnnnnnnnnnnnnnnnnnnnnnnnnnnnnnnnnnnnnnnnnnnnnnnnnnnnnnnnnnnnnnnnnnnnnnnnnnnnnnnnnnnnnnnnnnnnnnnnnnnnnnnnnnnnnnnnnnnnnnnnnnnnnnnnnnnnnnnnnnnnnnnnnnnnnnnnnnnnnnnnnnnnnnnnnnnnnnnnnnnnnnnnnnnnnnnnnnnnnnnnnnnnnnnnnnnnnnnnnnnnnnnnnnnnnnnnnnnnnnnnnnnnnnnnnnnnnnnnnnnnnnnnnnnnnnnnnnnnnnnnnnnnnnnnnnnnnnnnnnnnnnnnnnnnnnnnnnnnnnnnnnnnnnnnnnnnnnnnnnnnnnnnnnnnnnnnnnnnnnnnnnnnnnnnnnnnnnnnnnnnnnnnnnnnnnnnnnnnnnnnnnnnnnnnnnnnnnnnnnnnnnnnnnnnnnnnnnnnnnnnnnnnnnnnnnnnnnnnnnnnnnnnnnnnnnnnnnnnnnnnnnnnnnnnnnnnnnnnnnnnnnnnnnnnnnnnnnnnnnnnnnnnnnnnnnnnnnnnnnnnnnnnnnnnnnnnnnnnnnnnnnnnnnnnnnnnnnnnnnnnnnnnnnnnnnnnnnnnnnnnnnnnnnnnnnnnnnnnnnnnnnnnnnnnnnnnnnnnnnnnnnnnnnnnnnnnnnnnnnnnnnnnnnnnnnnnnnnnnnnnnnnnnnnnnnnnnnnnnnnnnnnnnnnnnnnnnnnnnnnnnnnnnnnnnnnnnnnnnnnnnnnnnnnnnnnnnnnnnnnnnnnnnnnnnnnnnnnnnnnnnnnnnnnnnnnnnnnnnnnnnnnnnnnnnnnnnnnnnnnnnnnnnnnnnnnnnnnnnnnnnnnnnnnnnnnnnnnnnnnnnnnnnnnnnnnnnnnnnnnnnnnnnnnnnnnnnnnnnnnnnnnnnnnnnnnnnnnnnnnnnnnnnnnnnnnnnnnnnnnnnnnnnnnnnnnnnnnnnnnnnnnnnnnnnnnnnnnnnnnnnnnnnnnnnnnnnnnnnnnnnnnnnnnnnnnnnnnnnnnnnnnnnnnnnnnnnnnnnnnnnnnnnnnnnnnnnnnnnnnnnnnnnnnnnnnnnnnnnnnnnnnnnnnnnnnnnnnnnnnnnnnnnnnnnnnnnnnnnnnnnnnnnnnnnnnnnnnnnnnnnnnnnnnnnnnnnnnnnnnnnnnnnnnnnnnnnnnnnnnnnnnnnnnnnnnnnnnnnnnnnnnnnnnnnnnnnnnnnnnnnnnnnnnnnnnnnnnnnnnnnnnnnnnnnnnnnnnnnnnnnnnnnnnnnnnnnnnnnnnnnnnnnnnnnnnnnnnnnnnnnnnnnnnnnnnnnnnnnnnnnnnnnnnnnnnnnnnnnnnnnnnnnnnnnnnnnnnnnnnnnnnnnnnnnnnnnnnnnnnnnnnnnnnnnnnnnnnnnnnnnnnnnnnnnnnnnnnnnnnnnnnnnnnnnnnnnnnnnnnnnnnnnnnnnnnnnnnnnnnnnnnnnnnnnnnnnnnnnnnnnnnnnnnnnnnnnnnnnnnnnnnnnnnnnnnnnnnnnnnnnnnnnnnnnnnnnnnnnnnnnnnnnnnnnnnnnnnnnnnnnnnnnnnnnnnnnnnnnnnnnnnnnnnnnnnnnnnnnnnnnnnnnnnnnnnnnnnnnnnnnnnnnnnnnnnnnnnnnnnnnnnnnnnnnnnnnnnnnnnnnnnnnnnnnnnnnnnnnnnnnnnnnnnnnnnnnnnnnnnnnnnnnnnnnnnnnnnnnnnnnnnnnnnnnnnnnnnnnnnnnnnnnnnnnnnnnnnnnnnnnnnnnnnnnnnnnnnnnnnnnnnnnnnnnnnnnnnnnnnnnnnnnnnnnnnnnnnnnnnnnnnnnnnnnnnnnnnnnnnnnnnnnnnnnnnnnnnnnnnnnnnnnnnnnnnnnnnnnnnnnnnnnnnnnnnnnnnnnnnnnnnnnnnnnnnnnnnnnnnnnnnnnnnnnnnnnnnnnnnnnnnnnnnnnnnnnnnnnnnnnnnnnnnnnnnnnnnnnnnnnnnnnnnnnnnnnnnnnnnnnnnnnnnnnnnnnnnnnnnnnnnnnnnnnnnnnnnnnnnnnnnnnnnnnnnnnnnnnnnnnnnnnnnnnnnnnnnnnnnnnnnnnnnnnnnnnnnnnnnnnnnnnnnnnnnnnnnnnnnnnnnnnnnnnnnnnnnnnnnnnnnnnnnnnnnnnnnnnnnnnnnnnnnnnnnnnnnnnnnnnnnnnnnnnnnnnnnnnnnnnnnnnnnnnnnnnnnnnnnnnnnnnnnnnnnnnnnnnnnnnnnnnnnnnnnnnnnnnnnnnnnnnnnnnnnnnnnnnnnnnnnnnnnnnnnnnnnnnnnnnnnnnnnnnnnnnnnnnnnnnnnnnnnnnnnnnnnnnnnnnnnnnnnnnnnnnnnnnnnnnnnnnnnnnnnnnnnnnnnnnnnnnnnnnnnnnnnnnnnnnnnnnnnnnnnnnnnnnnnnnnnnnnnnnnnnnnnnnnnnnnnnnnnnnnnnnnnnnnnnnnnnnnnnnnnnnnnnnnnnnnnnnnnnnnnnnnnnnnnnnnnnnnnnnnnnnnnnnnnnnnnnnnnnnnnnnnnnnnnnnnnnnnnnnnnnnnnnnnnnnnnnnnnnnnnnnnnnnnnnnnnnnnnnnnnnnnnnnnnnnnnnnnnnnnnnnnnnnnnnnnnnnnnnnnnnnnnnnnnnnnnnnnnnnnnnnnnnnnnnnnnnnnnnnnnnnnnnnnnnnnnnnnnnnnnnnnnnnnnnnnnnnnnnnnnnnnnnnnnnnnnnnnnnnnnnnnnnnnnnnnnnnnnnnnnnnnnnnnnnnnnnnnnnnnnnnnnnnnnnnnnnnnnnnnnnnnnnnnnnnnnnnnnnnnnnnnnnnnnnnnnnnnnnnnnnnnnnnnnnnnnnnnnnnnnnnnnnnnnnnnnnnnnnnnnnnnnnnnnnnnnnnnnnnnnnnnnnnnnnnnnnnnnnnnnnnnnnnnnnnnnnnnnnnnnnnnnnnnnnnnnnnnnnnnnnnnnnnnnnnnnnnnnnnnnnnnnnnnnnnnnnnnnnnnnnnnnnnnnnnnnnnnnncaagatggcgaccgctgctgctgtggcttaggccgcctacccagccgggcgggcacctgtcctccggtccggacggtggctggctgtccccggcccaccaagggtgctgcctcagcgcctctgtgcttctgcctgttccagaagctgtcaggttctctggcgcaccctctcacctgttcagactaatttcctaagttcggctggtcccggaccaagatggcaaccgctgctgctgtggcttaggtcgcctccccagccgggcgggcacctgtcctccggtccggaaggtggccggctgtccccggcccacacagggtgctgcctcagcccctctgtcaacactgtttttaaaaacaaattatatattatttttaagcactaagtctagtaccaaacatgatacctccacatggaaattgatgaaacattaaatggtttgttaaatgagtgaataaagaaataatttatatgatttttgtgatagaaaagctaatttgttacatttttaatttgtttgtaagctggttaatagatttatttaaaagtaaacttaattttcacttgcatagctttagaaaatgtatatgttagtggagaatgtgacatttattattttcttttacggagtgcctaaatatacttaaattcacatattctcctaaacatgtattatttctgtatggttagaaacttctaaaatcctttcttcacacttttgggttgtacagacaccattgtggttctttgtggctgctgtgctttacaatagtaaccctcttctgattcctgcctgaagataacctagtattggtatctcaacccatgcctcctcccttccttatcattagcctctggaaactcccattctactctcaacttctgtaggatcagctttcttatatttcctatggagcaagctttctgcctgctgtatttcacttacataatgatctccagctatccagtgacatccatgttttcaccattgatttgaattcttgcatttacagttaaatggaattctcttgtttatatttatttattatacttttaaaaatccactctgtagttactagactcctgtttgtctctatttctgagcctgtgtgaattgtgctttattgtactaagtgaaagacatataaccataagtgcagaactcacatagttagtgtttctgtagcgatggtagcaagctgcactctcatgagcaatgtgcagggggtctccttttcatgatcttctcaccagaacttatcctcagtctttttgagaatagctattcttactgaagtaatttctaaaaaacaaaaaaaaaaaaacaaaacaaaaacaaaacgaaacaaagttttacaattattgaatgtgtctgtgatgccagtgtatgactgtgggcacacatatgtcatagactgtgtgtgcatgtcagaggacgactttcaagagttggttctccctttccaccatgcaatgcttggacggagcacaacctgtcaggtatgcagcaggcgtacctgtttacctactgagctgccttgctgacccttgttgtggttttgatttccatttcctgataattgcaacatagaacattttcacatatctattaatttttttcatcttttgtgagatataaattcatgtttattgtccatttgatttttttctgtgtcatttcttttgctgaaaggaagctttcaggttggtgttaccatatttatttgtatttgctattgtttgtagtgcttcttgtgacatacccggaaaatccttgctaatcccaatgcccagaaacatttcctcttgttctgtgctagtagtagtttcttttagtaattagccttacattattttttaactcagttgagttaatttttataatcggcaaaaggcgggactctagtttcctagtttcattggtctgagtgtataaacaattttcttagcacaattaattttgccagtgagatcatctttgtcaagaatcagcttatttggctatgtgggttctggaccattcacttatgctaatgcagtttcacagagttctgaagagtacagcttcataatacattttaaatcagatgatgtgctgtttcctgattttttctgacattagctttgcagttgcaatgttgtgtgtgcaagcatgtgtacgtgcatgtgtgcatgtgtgtatgtgtgtgtgtgcacacacatgcaagcaagtgctttcatataagttttaaggaattttataggtctgtgaagactaccatgggtatttcaataggaattgcactaaatctcttgatcacttttgataatgtgtacattataaaaatattggttctatgaatccatgaacatagtatattttctcatatttatatgttccttaatatctatcttcagtgcctgtaattttgttaatagatatattttatttctttagttgaatttattcttagttatatttgatgttataaatttaattgcttttataacttctgtttcaataatttgctattgatgtagaacaatttgattcttacacattgatttttcctcctgaaatttgatatcattatatattatttccaataatttggaaagttttggtagagtcttttcctatgtatgaaataaaatcttttgcaaatagtgacaactttaattttcatggagcttcagttcctaacaacattagttcttagaattttttttacctttcttatatgtcttttgagtagctatcattagattctctactttgtatacttaataaatgattctagaatctgaaatgcctgaattgcttaattcctgtattattgctctggtaaattactgctatctcattcattttttttatgtttttattagggatgactgaaagtacccatgtttgatttggatctctgtgaaaattattgtactattttcaattttatgatgccaacaattaagataattctggtactacattttgtccctatatatgtctagcttatatccaggccaacagcaaacattgtgtcttcatccattacttatgtattataaactaggtaggataatagaggttagacaagaaaagaatcatacagaatatggtccatgtaacacgtaaggaatttctaaatattgtagatattcaatttgaacaaaaggttcaaacatttgataaacaaacaatggtgaaacatttaaaattatacagtcaattcacacataaatcagtttcttaggctctaataaatccttgctaaaatatttgttgactcttaaggaaaatagtactttttaattgcataactcatttgagtttattatcaataaaatcattgagtacttgatataaagcagaatatttttaacaaatttaattttgttatttttaatttatgggcacacttgtgtgtctgtgtgaatatgtgtatatgagtacaggtgcctttggagtcgagaagtggatgttggttcctctggaactgcagatgcaggcttttgtcaggcctcggattggtgcttgagactgaactccaatattttctaagagagctatttggtttgaaacactaagctatttctctagtccctaaatcagaatactattggcatgcctacagtgaaatacttcacaggaggacaggactcacaatgatcctgcaggggaagttaccaacgtcctacttactgggaacttaaagatcacagatgaagaataacctgttcgagacacataactagtacagagaaatcccaggttcaaacttcaaattatgtcactcaaatattctccttttatttttctaggttataatattattacattatttctttctatgctttcccttttcaattcatcccataataccccttgatttttttcaaattcatgctcctttttcattaattcttgttacagtaacacatgcgcacacacacacaccctattccatgtgtataatgttacttgtatgtctgttttcaggaatggctgtttgatattggaaaaccagttggtgtgctcttccttgggtaagactattttccccactctcagcattacttggttgcctgcaattctttgtatagggttgcagcctagtgggatttctcctgtccattttaccatttctgttgtttatttcctggttaagctcatgtcaatggttctacctactgcctcctattttctctcttaggcaaattcttatttgtttgaggtatcttgcttttctatggttgctttaataagtgaacattactttaatggcccaaaccattagaaacttgttctttcgaagccgtgaaaccagtaatggagattaacacgttggcaaggctacactttctctcacattgtgtgagagtcttttcttattttctcatcctctggtggttccaaatatttcttggcttatagatatttattataatctcaacttagacctcagtcttcagatggccttatgccatccaattgtcttttcctcttttggtacttatatgaaggtgtcattagagatagagtacaccttggtaatgtaggatactctcatctagagatgcttagtccaagtatatctgaaaaggcccttgaaattaactaataatttttgtacatgtggtgtgtgtgtgtgtgtgtgtgtgtgtgtgtgtgtgtgtgtgtgtgtgtgtgtgtgtttgtgtaaccatatgtgtacttggagtctggagaggacaaagaaagaaggcttcccatccctggaacttcccatcgcctggaacttcaagtcccttggagttgcagatgcatttgagccatcatgtgggacctggggaccaacctgggccaactcctggagtagaaagttaacatctgatgaatcagcatgaaggaaaaggcactttttaaaactgtgaacagagccacagactctgctcaggttatgatttgagcatttcttctttagcgcttcaatcctatacgctacactaaatattctatgaagtaatttgagagattcctatactgtgggcatgcctttggaatatttaatagatacagtacaggaaagtaaatttttgtgagaaatgatggaaattaggtaggtaggtatgtggataaatagaaacagaaatatccaaatgatagattaatactattgctgatgtggccagcagtaaaatcctgatgctcctctgtcattagtaagacacgaatagtaacatcttattaggaattctaatcatagggttagagtagctttattaaatttgagactcacttgtctatttggtagtaaacaaagacctcaataagttggtttaatgatacccctgtttctacatgaagcagtccccacgtttgccatagtctattttggtatatctcctatgaatttctttttttggatgttgaacatttctttaggtgcttctcagccatttggtattcctcagttgagaattctttgttaagatctgtaccccattttttccaattttattacgtatttacttcatttacatttttattaggtatttatttcatttacatttccaannnnnnnnnnnnnnnnnnnnnnnnnnnnnnnnnnnnnnnnnnnnnnnnnnnnnnnnnnnnnnnnnnnnnnnnnnnnnnnnnnnnnnnnnnnnnnnnnnnnnnnnnnnnnnnnnnnnnnnnnnnnnnnnnnnnnnnnnnnnnnnnnnnnnnnnnnnnnnnnnnnnnnnnnnnnnnnnnnnnnnnnnnnnnnnnnnnnnnnnnnnnnnnnnnnnnnnnnnnnnnnnnnnnnnnnnnnnnnnnnnnnnnnnnnnnnnnnnnnnnnnnnnnnnnnnnnnnnnnnnnnnnnnnnnnnnnnnnnnnnnnnnnnnnnnnnnnnnnnnnnnnnnnnnnnnnnnnnnnnnnnnnnnnnnnnnnnnnnnnnnnnnnnnnnnnnnnnnnnnnnnnnnnnnnnnnnnnnnnnnnnnnnnnnnnnnnnnnnnnnnnnnnnnnnnnnnnnnnnnnnnnnnnnnnnnnnnnnnnnnnnnnnnnnnnnnnnnnnnnnnnnnnnnnnnnnnnnnnnnnnnnnnnnnnnnnnnnnnnnnnnnnnnnnnnnnnnnnnnnnnnnnnnnnnnnnnnnnnnnnnnnnnnnnnnnnnnnnnnnnnnnnnnnnnnnnnnnnnnnnnnnnnnnnnnnnnnnnnnnnnnnnnnnnnnnnnnnnnnnnnnnnnnnnnnnnnnnnnnnnnnnnnnnnnnnnnnnnnnnnnnnnnnnnnnnnnnnnnnnnnnnnnnnnnnnnnnnnnnnnnnnnnnnnnnnnnnnnnnnnnnnnnnnnnnnnnnnnnnnnnnnnnnnnnnnnnnnnnnnnnnnnnnnnnnnnnnnnnnnnnnnnnnnnnnnnnnnnnnnnnagcttcagttgaggaaatgcctccatgagtatccaactgtaaggcattttctcaattagtgatcaagggggaaagggccccttgtgggtgggaccatctctgggctggtagtcttgggttttataagagagcaggctgagcaagccaggtgaagcaagccagtaaagaacatcccctccatggcctcttcatcagctcctgctttctgacctgcttgagttccagtcctgcatcctttggtgatcaacagtagtatggaaatgtaagccgaataaacccctttctccccaacttgcttcttggtcatgatgtttgtgcaggaatagaaaccctgactaagacactacccaactcattctatgaagccacaattactccgatacctaaaccacaaaacgacccaacaaagatagagatcttcacaccaatttcccttatgaatatcgatgcaaaaatcctcaataaagttctcactgaccaaatccaagaacacatcaaaacaatcatccatcctgaccaagtaggtttcatcccagggatgcagagatggttcaatataaggaaatccatcaatgtaatccactatataaacaaactcaaagacaaaaaccacatggtcatctcattagatgcggagaaagcatttgacaaaatacaacacccattcatgataaaagacttggaaagatcaggaattcaaggcccatacctaaacatgataaatgcaacctacagcaaaccagtagccaacatcaaagtaaatggtgagaagctggaagcaatcccactaaaatcagggactagacaaggctgcccactctctccctatctattcaacattgtacttgaagtcctagccagagcaattagacaacaaaaggagatcaagggaatacaaattggaaaggaagaagtcaaaatatcactttttgcagatgatatgatagtatatataagtgaccctaaaaattccaccagagaactcctaaacctgataaacagcttcggtgaagtagctggatataaaattaactcaaacaagtcaatggcctttctgtacacaaaggataaacagactgagaaagaaattagggaaacaacacctttctcaatagtcacaaataatataaaatatcttggcatgactctaactaaggaagtgaaagatctgtatgataagaacttcaagtctctgaagaaagaaattaaagaagatctcagaagatggaaagatctcccatgctcatggattggcaggatcaatatagtaaaaatggctatcttgccaaaagtaatctacagattcagtgcaatccccatcaaaattccaactcaattcttcaacgaattagaaagggcaattggcaaactcatctggaataacaaaaaacctaggatagcaaaaactcttctcaaggataaaagaacctctggtggaatcaccatgcctaacctaaagctgtactacagagcaattgtgataaaaactgcatggtactggtatagctacagacaagtagaccaatggaatagaattaaagacccagaaatgaacccacacacctatggtcacttgatctttgacaaggaagcaaaaaccatccagtggaaagacagcattttcaacaaatggtgctagcaaaactggtggttatcatgtagaagaatgtgaattgatccattcctatctccttgtactaaggtcaaatctaagtggatcaaggaactccacataaaaccagagacactgaaacttatagaggagaaagtgggggaaagccacgaagatatgggcacagggggaaaaattccttaatagaacagcaatggcttgtgctgtaagatcgagaatgaccaatgggacctcataaaattgcaaagcttctgcaaggcaaaagactccgtcaataagacaaaaaggccaccaacagattgggaaaggatttttacctatcctaaatcagataggggactaatatcctatgaatttcttaactgactaatctttgttgcctttgaaacatgcatcctttcctgtccatgttggttctttgtggatgtgttgtttttgtgtgtgatgttaatattttaggattttatgaataattctctgattactttaccctgagcctaggatcaatgtctgaccctcttcaaactttcagagagcctaaatgcagttgtattgtggctttcccaattccaagtctcaccttccctttttatttagacgtacatgcattgcaaagagtagaaatgcattattatgctcatttagagctgaaaaatttactgataatacacaaacctttccagtttgttctcagtacatcggatgaatctcaaaattttattagtctttttggttaaaggttcatattaagttagtgtgattaggaaatcgagtaatttataagttccattttgaattggatctagcatattaaataccatcaacctaaacaatgtgatttgccttgttttcttatataatatgcaacctttgcattttcatgcatttatctcactaggaggaagtgttttcccagtgagactctcttggagaaaattacattttgatttgtaagtggttctccatggaggtagcttctgagttagggagagggcctgtgtccagtttgcctcttagtttttgtgctttatctggtgtaggcccatcaggccctgggcacactgcctcagtctctgtgacttcatatgtgctttggtcctgctgtttagaaggccttgttttctaggtgtcctccatccccctctggcttttatactctctctgcctcctgttccacagtaggccctgaacattgagggaatggatgtagatatctcttagaggtgagtagtttgaggtcccatactctctacatactgtctggctgtgagaactggttgtagatcacatttccatgagtagatggctcatcaaaaacaaactcagccaatgtttggaggttcctcgtctcataatgttttgttgtggcttttttttttttctttttattcatctgttttcaacctacaggctttgcatgtatattatagctctggttttgtatttttatggagtttctaagtgtggggataaatatatctcatgtgtcctttcgtgggcttttctctcggttggttggttggttggttggttttatcctattatgattactttggttttgttttattttactgtattttaatgttaagctttagaaacttgttttttctttttcctaatgggaggcaggaaggggttattatagatgggaggagagagagagaaggactaagaagaacagaacaagggacactgtaatcagaatacagtgtatgacaaaaatccattttcaataaaagaaaaaaacaaaagaaacacaaaaagtaacagaaaaaacaaaagaaacacaaaaaaataactgtaattgttaacatttgtttgctacctatgtttcttgatgccctggatgaaaggcctcattgagctgtgatagttattcatatggtgctcttattatgaagaagctgagactgcactgctgctctctctctgcttaccctgtgtgagcttacttaatacctttttttggcttccatgtctcagttttagtgaaaatatattgattagatattttccttggcctttggaaaagaataccaaattttgggatgttactatagaatattaaccagtgaaaattctttactgttagcctatttactaaatgctagaaaatattctatgtatagattaacagttgcaatagatagtcatcttttaaggtgacatatctttgtttctgtaccttcatatataattatcattcttttattattgactaatggtagtgtctcacttctgacagatacaataacaaaaaccagggtattaataaaaagaatgtatttttaaataactatggtctttatcatggtagctcctggataaagttagacagagaaagacacataaatgctcttatcatgaggtcatcctggaaagaggagattaaggtttgtgacaagttagtgactaaatttggaaatgacttcttcacttaaatagaaatatcaggtgagaactcttatttggcaggtttgatcacaatctcatgaggaacttgccctctacatctatattcccggcccccaaagaaactctagcctactacatatccattttttaatctgctatatttgtggataaattattacacagtactagaatatggatgtagcagttcatccaagagatatacacattctcttatagcttaccctcaaatgaaagcaagatagagagacataaatacataagacgcacaataggacggcaccagtgctgacctcacaggtgtaactgaggccagatggagcacagggagtatgctttgtacagcatggcctgagagcaaaagactgccaagtagaggttttattagatcttagaaagtgggaagagattagccatgtgaagatctaggaaatggacagacaagcagggacaataataattagagtctaaatataggcagtaataagtttaacttgtttgggggacaaaacaaaaggagccaagtttccaaagaaaaagtggctggagatcaggtagcagagatgatggaaacattattcttaatgattttgatttgaatttcattcttattacaacataaactcactgtattatttcatgcaagggaacaatataatgtgccctggtttttaagattactctagcttctgctttgataccagattacaaaaggcaacagtggaaacaggaagctggcaagaatgtaattgtgatgtgaattggtgatggcagaggtggggagagatgactggtttgggaatgtggcttagacttgggttaatagggcttgttgagaagagcacaaatgttgagtgtgacacaaaagagcccctggattttgtctgagtgactgggaggatggcagtgccttttagaagaggtataggtaggaaagcttgattgtgagagttagtagtgagattgttgctgtaggattccaagtcttgttaggtgtctgctattctacaatacacagaacttaccaggaatgtgctcattaacctctattatgtgttgtaagctagtttctttctttgacgaaccacctgtgatatcccataatatggtttttatgagttcttttttgtgtgtgtgtgtgtgtatgtgtggtaaaattttttcaaaggctatttgaatgctgaaatattatacactgactctaccaatacatttgagttaatcagacataatttttcttatatagtgctgtaaagtactctgagggaaaaaaaaaatcaaggtagcgttttcattatgctttattaaagtgtacgtatcaaatacaggctaacccttggtctccccctgattcagtatttgttacatcttcttaccatgcttttccttattcattagtggttcattcattcatgccaccttacccaccttaacagtttgtggcagctctgaagcaaattctataagcatagtgagaatttgggtggatttttattacacttctgtgagctctacagtaagaatatctttgtaagtatggttacatagatacattcactctttccacatgatggaagggtcagaggagccaagggaaaggcaattaatatcaacactgcttgatggggacacaaacagctggcaaatgctgtgtcgtaaagaatataaccattactggatgtctgtggactaccaaatataaatgattctgtggcccactggtatatttagataccaaggtatgagaaagtacatagctgagattggatctgctaaattctgatgccagcaatgggacaaactgcaaccactgtgcattgtgagatacttgtatgaactcatgtattataaaattaaattgtattgtgtagttcattgtattgttccgtcagattttgatatcctcattttaaataattcatgggaagaaatgatcacttcataatgccacaaactcacagcaggcaaaactaattttacacaatatgaaaacagattttatttatttaaaaggaatattaaaaaaaacacaacaacaacttttttgacaccagctgctgggaaataaatagaatactttatgacaaatatctaaatctataaaagctgttcctgggagagcaagttgtagattgtaaagatacatttacgtggtttggtcagtactggaaggcgcatttagagcaaaacaaagcctcccatttcctttaatttcttggaatgtagaagttggagaaaatcagccttacacagtcattccctgtcctcctaacacagtgccagcagtgggacaaactttagctttaataccagccaccccataagtacaaatagtagaaaaggagctagcgaggtgttcttaaatctcactgttcttagtgttctttgtaacgtggcctaatcattctttgatgagagctgggtgtttgaggtcgccacagaaccatcttccagtgtaactttagagaaagatgagaaaaccaggtgagcctataaaggggccgttttctctggaagtgtttactaaggaaacatcacccacagtagtaaacagtctaagctcgttattcaatgtgacagtaaattcagatctgttcaatgaaattctgtctgcagacaaaggataggactgaagccctggccagatctgggcttaatgtaggtaatgtcagagtccaggctgctgggtattgtgtagctttccagaagcatcagcaagagaacagaggtgaggcaagaaaggctggggctagagaaagtgaatagacacagagggaaaagacagagcctgaaaagagtcgggcactttattactcccagtgaaaacccactctgctggcaatctccatgttgtttattacatttgcctaaaaagaaaagaattaaaaattcttcctaatggtgggggtgttaattttttcgaagagattgaccctacacagacgtttattattatttctgacagcagctgaattccaggcatctttgtgtactttataatagacagccttatataatgtccatggtgggagggcttacctctggttttgttaaacatttctttctttacaggttaaaagttaagattgagaatttcttatacaatttgaaaagttacagggtctgaagtcctgaaatatggagctatcaccattaactttccatatgtaaagtacaatgggtgggaagtcgcaagaagaacatttttttctctaaaagcatgaggacccgagctctaacacccccccacatacacacatacgaagcaggacatgtctgcacatgctttcaacccctgcatagtggtggaaggtgggtagagacaggcagatacctggagctcactggctaaccagcttgactaaaacttcatgcttccagttcagtaagaaacctggtctcaacctctgtgttaccatactggtgtgtatacaccacacacataagtcccattcacatacatggcctatcccaccacacttaaaatatgcaatgtttgggattcaaaatattcaatctatattaccaaacggttagtaggtgatgtatttcagtagctttgtttgtttttcttgggtgatgacatataagataacaggttccttcatcttccatacattagtacattctaacatatcctttagcaaggttgctctgagaataattgaaagaacattgggattccaataatgaaggtctgagttcatgtactaactaaaattggtgaccatgtacaattcatttcaaattttgtggtccttctgttttcagtgtgtaagctcaggttagcaatagccatctataagattctgtgaccccattcagtgaactattggaaaatttgggaaatgttagaatgagatttaaatagtgaattcatcctctactgaatgcttgataaattctgtttctaaacagctacacccgtccattttgaaggatgactgtgcatatataatgtaatatgtctaaagtgacttccatttgtgcagtgcatttgctgcaacacagctagaattataatgcaaatattagcaaaacaaagctgccacagcaatgttagtatcaggagacctgagttacattgtactaatattttagcaaatctatatatattttatatattatttatattccaatttgtccttgaaacaaaacatatagcactctggggtcttacagaaaacgaagatagacaccaggaatccccagctttctcttgattgtctctgactttctgtgattcctaccttttagaatataaagtttacatatatatgaaaatagattcttttcttatatatatttattatagttcctgcctacctgccctcctctgcagatacagtccattctgtcccttattagaaaaagaaagaaaaaaagaaagaaagaaaacaacaggcttctaagagataacaaccaaacacgaaaatataataagatgatccaaaatttattgtattgaagttggacatggcaatccaatggacagaaaagagtcctaaaagtaggcatacgagtgagacacccacttgttctccctgtcaagagtcctataaaaataagccgatagcccaacaattccaggtgcttctttccacacactctctctccacaccatccccctgcaacacacacacacacacacacacacacacacacacacacgcatgcatacgcgcacacctgctcccattcccgccctccccagtccaccctaagatgtattctattttctgctctcacagggttccatgcgtccccactagatgcctactctttatatactctctaggtctacaggttgtatcatggttaccatttactttatgataaccacttacaagtgagtgcctactatatttgtctttctgtatctcagttaccttactcagggtgagtttttctagcttcatccattagcctgataatttgatggtgtctgcttttaattagtgagtaatagcccattatataaatatagcacattttctttgtcaatacttctactgagctacacctaggctttttccagtttctggctattatgagtaaagctgctatgaatatgggtgtggaggtgtccttgtggtagaatggaccttccttagagtatatgccccaaagctgtatgctggggtcttcagccagatcattacttaattttctgagcaactgccatattgattttcacagtggctgtacagatgtgcactcccagcagctgtaaaggagtgcttccttagtcctcaccctcacaaacgtgagctgtcgctttttgtaactgatgtcagccgttctgtctggtgtaaggtaacatctcaaagaagtttttatttgcatttccttgatggatagggatgttgaacatttctgtttctcagcaattttgaattcctttattgagaattcactgtaccacatttttaattggatttttaatatttttgagttctttatatatttggattattagccctctgaatgtggagttggctaaaaatctgttccaattctgtagtctgctattttgtccaaatagcagtgtcctttgccttaaaaaagcttttcagtttcatgaagtcttatttattaattgtgaatcttaataccagtgttatcagtattttgttcagaatgccaacttatctcctgtgtcaatgtgttcacacattctcttctatcaggttcagtgtatctagtttaatcttgactttttgatccacatggactgaatttagtacatatagatccatttgttgtaaaggactttttaaaaaaattaatttatttattttttatactccatattttattcttcctcccatctacccttgactgttccacatcccatacctcctccccaccccctgtctccccccacccccatgccgcttgacctcctaactccctggggcctccattctcttgaaggttaggtacatcatctatgaataaacacagacctggcagtcttctactgtttgtgtgttgggagcctcatatcagctggtgtatgctctctgtttggtgatccagtgtttgagagatctcagtggtccagattaattgagactgctggtcctcctacaggttcacccttctcctcagcttctttcagcttttccctatttcaaccagggttcagctgcttctgtccattggttgggtgcaaatatctgcatctgactcttttagctgcttgttgggtcttccggggtacagtcatgctaggtccctttttgtgagtgctccataccctcaataatagtgtcaggccttgggacctccccttgagctgtatcctactttgggcctgtcgctggaccttcttttcttcaggatcctctccatttcatccctgtaattctttcagacagcaacaattatgggtcagagttgtaactaggattgcagccccccacttaatgttctgcatggctgcttggcacgggattatatccaaagacctaggtctcagtgattctgtgtgatctggctggaatgtgcagacaagacacacacctttaatccctctggctggaatacagacatacccatagcacacagctttaaagtgaagctagttagtagaaggaagctgtcatgcttgaaagtgacttctaattgagggacaaagtgacgaatcagagaacagattgacaagaatcagataccaacacaagaaagagaagttatttaagagcagctcagggagagtgagtccattgggagtcagtttagttagtgcagtggcgttgaggaacctttgtgaattcatgcagtttgatgcaagtcagcagaggcacttgaagccagagaatgcaaaggagccagaaggttacaagttgctagagttagtttgagaccaagcaaagaaattcagtgaggagctgagagaacccaaattaaatcagtcagcttggagaggagtatgagccagaacatctgagttaaaccaactagttagagttcataaagaactagaaagggtgagcctattcagcagtaagacggtgagactacaattacatcaggcaaataaaggttacagttagagtttgtgttcttctacctgtagacatccagtttcaccataaaggtgctgtcttttttccagtgtatatttatagatttttttttaagatgaaaaatcagatgtctgtaagtgtgtggatttatgtttatatctttaattcaattccattgattgaaatgtctgttttatgctaataccatgtggtttttatgactatacttctgtagtataacttgaagtcagggatggagatgcttccagcagttctttcattgttcaagatggttttggctatcttgagttttggcttttccatataaagttgagaattgcctttgcataactgtagagaattgtgtttgaatactggtggggattgcagtgaatctgtggcttgcatttggtaggatggccatcctgtgatgatcctacttatccatgaacatgggaaatctttctattttttaatattttcttcagtttcctcttcaaagacttgaagtttttaatcatacatttttgcttgcatagttagagacagtttatattatttgaggttattttgaaaggtgttgttttcctgatttatcagcctgcttgtcatttgtatataggagggctactggttttataactattatttaatcttgtatccagccactttgccgaagatgtttatcagctatagaagttccctggtggaagctttaggttcacttatgcatactaccatatcatctgccagtaatgattctttgacttcttcctttccatttcttaacctctttatctcctttagttatcttattgctctagctaaagctttattactatattgactagatagtaagtaaatggatagccttgtcctgttcctgattttagtggaattgctttgactttctcttcacttcatttgatgttgtgtataggctcgctataaatttcctttattatgtcccttatgtatccataatctctccaggacttttctgatgaagagatttgggattttttcaaacgatttctgtatatctaatgaaatgaacatatggtgttttgctttcagtttttatatgatttacatttactgattttcatacgttgaaccatcctgcatctcttatatgaagcttacttgatcttggatgatcttggattcagtttccaagtattatattgaatatttttacatctttgttcatgatggaaattgacctgtagtacttcttgtttctattttattttgatttcagctcttagtttgattaattcctgctgtctgctacttttggatgtatttatttattttttgcttgagagctttccagtacacttctaagttgctagtgttaagatttctctgaattttttaagaactatgaactttttttaagagatacgaactttctgcttagcaccatttttagtgtatcccataaatttgtatatgctatgtattcaaatctaaaaagtcattcagctctttctttgtttctgtctttactcatttttcattcagcggatagttgtttagtctctttgagtctgtgaggcagaacagagagaaggaacagttctcctggcagcctacctggtgttctggcaggcatgctctgcctgataaaatcttagctttcagtgtgcctcaagctactccatagaatgcaaaggctagagtgagaactagccatcattcaaagtccttcttacagagaggacattgtacacgttctaaaaggatcataatcccctttgcctatgtagttgatttctgtaagtcaaccatcaaacagaataatgaaccaaatactgtcacttataatgtggggacataagtagcttacttagagagactaatgaaagactcagtgtccagaaatgtacataaggaacaacagccaagctgtcctctggccccctcacatatattcacctcctcactggtagaagcacaaatacactcacacacgtgtatgtgcatgtacacgcttaattctctttgagtactgtctttgaacatatagaatttttttaaaaaaaatgtttcatagcctaaaggaacataataatgtcattttaccttagcataatgtctggtgcctaatgcctaatgtctaatgtctagttagaagatgctgaaagaattgtaattagtgaatttgaaatggctgttgtaaatagcctgttgtaaatttactttttagaataaattgccacatatttaataatgactgtcatagtgttggtatcagtcacatgactatgttaaatctggagatggataataagtcacatgggaaacactgccatggccagctttaataaaagtaactaaaaatgcatattcatatatatcaaagtatgaagcaaattttaagtagagtgaatttattgagaaaaaaagtccaaatgggatgaattaaattttttttatcacatccatcccctgcttctccagctttttctcctcgaagcttgcacactcccacagcatggtcccttccttcttttttttgtttatttttaatagcaaactgagcccaattaatgacgcatcagtgtggaggttgtctgttgatgcttgggcaacctaccagtagctattcctcaaaagaaagtgactctccatttcctggcaccagccaactgacagtactttctcatcacagataagaacctgtgagctcctctcatctgtgctggggctttgactgacttgagcttgtgaaactgctatcatgagtatatggttatgccatatccagaaaacaacacttgcagcacctcttcccacccctattttttttttttataattttttcctttttcttctctgaacctggtgatgagtgacaaatagatggtatatatgtctcatttggggtaacttgtcactgtcacttatccttagcattttgactatttatgactccctataaaaactgctgtacaatgtaaacatgtgtcatcaaacttgagagtatcacaaatgtacaaatataatcataaatattaagaaagtattttgacaacataaccatttagcaaaacagcaagagcattccccactatcttagagctatgacttccctatcaaagaaggttcacagatgagattggaatgctctcctatgctgtaggcttcaaaaccaatcagaaaatggatggttactcccttagcaacgatggcaatcttatgccagtagccaaatcttgactaacagatggttattatagaatgagggtggagtgttaagacctatttctctgctgccaccatgcatagcactgtgattgctagccagtaaggagaaagttttacagttatagattgacttctgtatgcagccagagggtttgtatggtaccttcagaaatagtcttatcatctagttatgaaggacaaccaacagcaatggcaatatcctgaccttttgatcaatgtagtcagtttagcatggtgacatagattaggccatatgtgacagagggaaggattctgtagatcaggcagaataggactttgggttatcatcacagaactaatggtaaatttccctctgtgcaatcacagtagcttatttttccccctaggagacacatctatagactacctgacacttaacttctttaatggacgtaatacagttaaaatgtgtgaaacctcaatagattcgatattaaatttcagataaaaagttggtaattaatggcaggcttcacacataattagcaatgaactttgaacagggcctgcctagggggagttggatcatgggtttctagaattctacaatcatttcattctagcaggagaggcataggcccctaacttcattgaatagatgagagtagatacagcaagtaaccagggaactttctgcctgagtctataaaaaagctgggactagaaacaagtgcctggtcctggtgtgcaatgcctatcatcatagagtttgacttcttcattcctaacattaattacagttactctcatataatgatttgggccattatttcttaactaagcattcatctacttgagtaatataaatgacaaacattcatgtggcactttccctaattctccttaaggcttgttttctagaactccatactctgtttatatcagagttggtagacagaactaaagcacagagagactgagtaaatctcgggaaggaaacataacctgtaactggtaaaggcctgggtttagaacccagggtttatgaggggtctagagctcatactctatcctatgcacttatgtgagtacttagttatataaccacctggcaatagcatgcataaattctctgtatcttggggggaaatacagaatgaataaaatgcatgtgatctgcagggaaatccattattaaaaacaaaaacaaaaaagaacaaagttggggataattggatgtctccttataggggaaggaactgagagcaaaaggtaactaggatgaactgaaacattgcttactctaggtgaccgcgagcaacttaggatctgaagggtggggttaaaaggacaccaacatgaacgagtactgcagcccactatattggagtagatgtccttggtaggctacccccatctttgtgtcacgctgcttgagtgacagtaatgttaggatctagcttggtactgaggtagtacattggaacacaactatgctctgttagactgcaattaaagagcataagtttaatcttaagccatattataaagcattgaagagccagagctgcatatggttctgacttgtgactcttcatgtcatcctatatgattatcatgaatgtaaagctacctgatacttctctgagctccaattcctcacctataattagggtaattgtactaatcttttaggttcctggtgaggaggagcaaataataacagtctccaaaatgcttagcactgggccaggcacacaggaatactaaacattttaagactaaaaatcattaatttttcaaatatggattataatgctaattactttcttatataaaaaagaaagcatggcctaggaggtaataataagtaggactttatatctatcaatccctcacagcttttggataaaggaccttgaactctgaattgtgaatagtgcttataaaggaagctttgtaaatcaacttatttaaaatgcagtagaacagcttatgatttaaaagcatcctgtggtgaatccttttataatgcgaataatcaccccctaatttacctgttctgtaagttcagagtttggtttagtgtgtcttcttaagcagagaatacacctgcactcttgttcctccaaggtaagcagtactttcatgctgggaagactttcagagaaatacagggtgcctcttggatttaagatggcagagggcagtaactgcagagacacagaaggcccctgttgtcaggaagaacattaattgtactttgtgatgcatacatttttaatgagtgttcatcctcataggccagtagacctagactgtcatggggatcattgaagcctaggagtgttgcccacatacaagatctagttactagaaaacaatttgccttctttctctgaaatttcaatggaactcaaaatgaaattatgacatgccatacaaatccctatgaaacgccaagcagtatgggaagctgtgcagtagaaagagcagtggtctaggaactcaacctcagctaaacaagacccactgcatactaacagcacagggtacagagaggtgtaactttttctgtgcatttgtttcctgattgtaaactaattgtgtgggatttacattccatatgtcacctctaactaaaaatctttactaatctgattcataaattcaggtaaacttttctgtttctttcactctggtttaaaaaaaaaaaaaaagattagaagaaaaaaaatcacagaaaaacacttaagagtagttaagaggttttcatgtccaaatcaacaatgcttgtcactctgcctcagcttgagcccttttttttgcagatatgcaaatttataaaacattttatttaactgtgatatagagatgaatatcaaagtgggcaaactcaaaccaaatgagtcttttctaccattatccagcaaacattgacctgtgtttggagaaacttgcatgtatttgaaatgaaatgacctctcccacaaattaattatatctaggactaaaataattacgtcttttcattgattctttttatttcacagtatccatgggaattttgccaattcttcatagcatggtttaagctcattcatacctaacttgaatgaagtacactttaaatatatgtgtgctcaataccatgtatcaaattcgtaaacataagctacatgatgtgtcataaagcagggtctttaataagtcaatgacaacattgtaagagcagagagaaaaattaaaaacttttggaatttttcatactttttccaatccattgaagatgctgagtgtggaactaaaatccgtagagtacagatgcatctgatatcaaatggagaatttaacattttaaactgattcatgcattataaatggctactatataaccttgaaattttttgtcaaaaatattcaagcagatagattttaaagagaaactcatgagcataattcaggtaaggggtaatgaatcgttaagtttagctaaattggaagttctggcaaatctttgtaatccaaatcgtcttctgagttccactgccaaacctaaagatgctaaagctaccatatctgacagtgtgtgtgacaagttttgcaggtaccagaatgactggaagcagagcagagaatccttatttcacaatgataaagtactcatctagtcagtttaggtctttagagaaatcatgatcttgtacatgccatttctactttttaatgtgtaaagataaaaccattttgtccttcctaatataataaatataataaatgttaaaaatatgcaacatagtaataaaccatttctattttctcaatacaggttgggaaattatatgctctattgaaagaaggaatcattagaatgataatataaatattaaaattcaaaaatgcaagaccatatctatagacaaattctagcacaagcagtagattttaaaatttattgtgatatataaaaaccataaaattattttatatgtaaagaagagtcaagaaatattgatgggctggagagatggctcagcctttaaaggctaggctcacaaccaaaaatataagggtttggttcccagcacccacagctgtctctccagccacctttttttgttggtgttggacacagcatccgcacacacagactactaatatcatttttaaaaaaaacagctgttaaaaatgtcatcggtatgtaaaatgaataaataagtaaatgaaaaaaaagaaaaagaaagtaaaaagggattttgagtatatgttcagtgttactggaatgtcgacctggagaccccaaagatcttctgaaatcttatgtatacaacccatagaacaagatgactacaagtgaaaggtttgggttttttttacatctttatatctgtattgaagtagaagatctggattccataatggagtccaatttatgctgaagcagactatgttctccaagcaatacttgattttatttttgaagactggagaactcataaaagcccaagagcaccctctagtgagacttttgtgataggcctagggacttcctcttgaccttcaccatccctttctaatgacctttaattttccagtgtgtgcaccctggcttcctactgtctggccttagtgatcagcagatcccagcgaaggcggcaagcttggaaagtgtctccgagtgaaagggctaggacctggggtccatcgttctcatggctttgttttcactcataaaagaccagtcaatggccaactaactttattgtctgttaaaatggttttcagaactagttaagggaacataagcaatagaagtctgtaaatcatttgtactctgagatctgctataatacagccaggagcatttttgtatttccaatatgaggaatatggccaaggttattaaggtgatttggggggatgacgaccatgtgaggagtagataacaaaactctagatttgaccagagtataccatatacatttatttaatgattaaattgaattttataaataattgatgagcattgaaaaataaatacttctaaaatgtaaagaatgagtaaatataattatatatgtactcttgtattttagaaagatgaatataaagagactgtcttaactgtgttagtttgagctgtgaatatgtcattcacttagattagtaactgttatataacaattgatacaaggttaattattacttgaatttataaacaagttgacataaagtgccaccgttggaagggaacttagagatctagatctttccacttcagacaaacagaagcaaagccctggtgtacctaaatgttaagcaacttggcaagatggttcaagtggataatggcagtattgggcacaacagagactccttgtgctcattttagtgtccatatgctacaatagccccattattaaagaggctgtaatgtgatcacatacgctcattctcactgattttggacaattcttcatgcttagagtgaaagtgtgtgtcttactagtccctctcttactctgtctccactcttgtataagggaataagttactttctgggttgcttccagacaggagataaatccatggttatgtaatgagatctctttattctagaaacactgtgccacactgtttacttgtgactgacccttcagtcagattaatattctagaattactagaaactgttcctgtgagactctgcttctgattcatgtgttctgatagttttatctgttagtgttcacagaagtattatataatcaaattttaaaagtaatggggaaagctgttggcattcattaaattcagtgtctgtgttgaatgttcttatctaatttgggaagaaaacaaggtattcttggaattatccaacagaaatcagatcaataactcttttaaaaagacttttaggtatatgatctgatttcttgaaaataaccaaactgtttagcatacttattttactttagttttaggaaataaccattctctttgtgtatttgtgctttaaaattactgtacaagaattggcattttggcaaaatgtatcccatagtagtttagcaggagtctgtgctccagtcaattctcagttcattaccacagtttacatcttggctttaataattaagacttagttataatagtcttaatagctatgcctttcaccattgctaatgtttgggagatgagataactatatgtggtaaatcaaggcacaatgtcttaatttcaattgtaataaaatatagctaatttagtgaacttcattttcatttctttgcctgctaaacaattcctccaatgtagtgggatttgttttgtttgtttaagaatataaagtgagtgatattatacatataatatcacttctagtgctagaactgataatggctatcaaggaggccaccctctttgacttttagatgaacaaactgacactatacaagaaaaaggtattggaaatgtgtgattttataacttgaatttcagcaataggtatattgttattttcctaaatatagttgactctggagaaacaactattcagttttacaggtactctgacccaaaaaactaaccaacattgtgtttctatgtctagactatacacactacattaagcctggtcacatgctagcacagtgcagcatgtctgcctggctggctttctaattcttgtcagttcacagtgatgttaaagaccacattgaaaccgtaagtgactactgttaagtctatttcatcattagctgcaagtctaaacagtcacagtaatgaggcggcatggactctgcatggtctactaaatatttttaggaagtggaaaccccttctggagttctgagagaaacatcactacgaaaatgcctttaaaagtactccagcataaacactgcagtggaacatttcattagcttttcgagaacaataaagaaatgtggagcataataggctaatatgtttaagtggccttggtagaaccctacttaactcagtgggattttctgcagcatgcagaggtgaaaaaccattgcctatatatgcattttgtaagactgccttcttcctcattgcatgcagtgtatatcaaagagaagtgactttctgtctgtaattctaaaatgaagaaaatctcaaaggacacattttagaagcatcaatatttaggtgggatgatcagcaaccaacaggctagcttttggcatcctggattattgcaagatagagaaggaataaattgaatattagcatagcccagcctcctagagcttccattgctatcagagatataagatcctaaaatacacaagaaaaagacatgatgtaagccaaatcttattggttataaattacaaagtctaattcaagtaatgaaaaattattttgctatttacactttaattctatcctgccaaaaacttgaatgaagtaaaatgataatttaataaaaaacaaagtggtaattttttaatggttttattaggattcacgtaactacactgaatgcagcgctggccttgcagtatgatcttctgccaatacctttagctcttggagcgtctgctttctctaatataaattgggactcattagtcctagggacactgtgatctttgtaatttgattaagcttttagggaaaaatgtaaattcagcatacaattaaaatgttttaagaaagttcaaaaagacctacatgagaacaaattaaaagtattaagtattttcctttatgtaaataaattatcattaaaattcattgaaaagtcagaatccgtgttcacatgacattgaattagtgatacaaagaaaaaaacttttgaatgacagatagcttgagtggctgagacagcgtatttaagctgttacgtttgtttcccttactgtcaaaccctatcttcaaaaagctatcaactagttatattgatagatggaatctgtccttcaattccaggatgtgttttctatcaaatgttctcttctttggttgttggagtctatatgcaaaataacatataaacacaaatgtaaaacccagctgtaattgttgctagcagttggggacatcataaattccttcagaagtaaacttgtattgtaaatatcaccagagccactctgtaggagtgtgaaaactctaaacaaaacttagtgaagacagtgcatgtggctcttcctccgccagaggatcgtttcctagctaccctacatgctccagtggaatctcacaaaaggctccaggctctccaagttaatccaacaaagaatcaagtgggtttattttaaaatttacccttaaatatgtttgctagttttgaaattctgattttgtgctttgcttgtgtaattcaaaaacagctttagtttaaaaacaaaaattggcaaaaatactagtgcattatgtgttttaatcacgtatggtgttttgaaaacgactcaaaattgagaaaattatttcattgtaattacagttcaaatgcatggattttctttctcataaattgtgtaaaataaaataaaagcaacagacttcttaaatgagtagtatataaataatgaattatataattattctataataagtacaacagctatataggtgacataattttttgttgtatgtgtttatatcctttatttaaggggatttgtactttcctttcatattaaaaattttaaattatgcatagttcttagaaaattttatccactgacatggttaatattcaagctctattatcagtcagccagatttttctcttttatggagttctttgattgttcctataagagcttctttttttcttttcttggtaatatataaacatagaaagagaagtttctttggctcatattacactcatgagacaatgatgatgccgaagttcttttcataatcaggacctttgtagagattgcccaggtattcttagccaaaatctctctctcattgtacactactccagggcaacatgtggtgtgccagctggatgccctccctacatgcctcaggtggccacatttcaatggtgcctatagagcacaggccaaattctcattctctgtgttaatcagtgggagaattcccatagaaaaagggatagaagcatatttcaggaaaactctaagagattagccagatgattaggccaggacattttaagttcagattttatgtagaatttctatggcattattttagttgactgaagaatgctagaaaatctaaagatatttcaaattaaaaatatctttttattaccctatgatttctctaaattgttttcttaagatgtagtcagaactcatattgatttgtaaactcaaaggcaactgataaaccaattaaattaatctaatggaaccattctcccataattttgaaagaatccgatttatatctagtgaactctcatggtaacaatcttttcattcggattttgttcagttccatggacattaagtaaatgtatagtatgtgtaaagtactatagtagatacttttggtagttctgcatattgccttatagtattgaatatattgtcatatatattttcttgtttatggtaagtttttaccttttaattatttcttacataaattgtgtaaagtttcagatgttatagtttatttgttctgtgtttgtttggggtgagcctgaagacctttgtagaaagacatttagttttccttgaaagaaaaaaaacatataattttgacatattaaattgaccatggtgaggttatttttaattaactaattgaaactgttctataattagcctaattgtaatttttatttactacgtttaagcaaatattaatttattccatttcatatattttctaatataaaagtgtgatttatcaggacctattcttcttgcttaccatatattaaatattactgttctacaagaattatgttaatgttatataacttctggataacagatatgtaaatggttacattccacttagcatatacaatatcttctacaatttttgcatcttattcagaatgctattttttcacttttgtgttgctgttacggttttgataatttttatcatctttttcttaagtctacattgaaataattgaaaaactacccaagttttactttcatccatcagttgtatttcacttacacatattatagaagtaaaatttatcattatcattcaaattttctaagaattaaaaaatcatttttctaggaattgaacagactgcatttgtcataaactcaaattttgaaaacttgtttgggatgaattttttcctgatatcaaattttcaaaaagatgttccgcaggaaagccatccgttatgtcatttggggagtttggcccagagggcagtcatgttgaccccatctgcagaggttggctaaactagaatcttggactaagtaaatcccattcatcaaggtccacataaagtaaagtaggtggggagcagggggacagatggtagggtcgacagcaagaaagttgttgttgacattgatgtagacccttcttcttgccagagtgactccatggacttcttttggcatgaaagcctaagccaaagctatcatcttaatggaaggtgagctgcaggcacactggagagatctagacacagtaggtatctaggattggcttagattctgtctatcagcttgactgccatacctatttgattgatgtgcagtggggcctgaaagtgctgttttgatgttaaggattgtgtcataaggttcctgatatggtgcacatgtctggatgagattggacattgactgtctttgcctatgccaagcaacaccagacttgagtgcattattctgtggatcagtagcagatggtgagtgcacacatttggagggggtgtgccttcaaacacaatatggagccaacaaacttagaaggttagtgcatgtcttgactttggcagctatttttaaacaatgacaaaaatttcccgtattagctatttttactttgagaaaaactaaacacattcgtgttctaggcaacagaagtatactaagcaagtatactattctctgtgttggtcatgtcgggtggagagagctcttggcattggctaaattggccaagtgagtaattttggattgtatatactcaaacttggtaccaatataattgttaacaatgccaatgaatcctataagtagacaaaggaagggacatcacagtactacaaagtctacatattatattataatatgtgacactagagagtgattttatattctttggcttttgattgggtcagagtattctgttctttagaaaaagaaaaattaagaatatatagtcaatagaaacatcttatacaaatatactatggaaagaaatttatagatgacataacagtagttatagacatacaggacagaaaatttctaaaaatatttgctattgtgtcttgagtggattctgaaaccatataagtcaatttttcatcaaactgcttttatcagttataaaggtaaaatatgcatatcaaagagaatttggaaacagacaaattatgcaactaaattttaaatccattgtcatcatcaattaggattgtttctaatatttcccctacctccttctaactctatgcacaactctaaaatatatgtgtttgtatgttttaaaggagttttggatcatatggtatatgttgtgctttctcagcatcaataattatgggatagttataaaatgtgtactattaatacattcaaattattgtatcttgcgtactaaaaatttttaagccactcctccttatttaacactaaagtgatcttgaacatcatttcttctactctgaggatccatctttctgaggaggtaaatttctgagttagagagtgtgcattcaaggttctttgaataacatttgccaaattgtatgtagatggattttcctaggtaattttctccttgctttgaatattatcattatttgtcaatttggcaagcaaaaccaaggtttcttttgttttggttcaatccattgcattaacatagaactagtgtgcctcacatatattgatgtgacattgtttcctccttttaataaactgtttgcttgtgtcctttactcctgtcatcatgctggtttgtcagattgtctttaaatgttaagtcattaattgtacaaaaatgtttgtcctagttttcaaatgtcatattattgtctttgctgttgttgctgtgagaaaaaaagtacttgtctgagtaatcctattgttatattctcttttgctgttattgcccaatagcttgatattgcataactagtcaacattgttttcgaatatttcaatagtctagtttagattaaggtatgaaatcaggatcttatttaattgtgctggagtagttaatctccgtcctcattcactcacgctcacgctagagcatcattgcatataagtgttaggagcattggaagatttttcttgtcagtccttgttggttcctacagtatttccatgttgtgtctctcacactttcacagtttatacatttattaggttgaaacctccattttaatctcttattttcatctttcctttcctctcatatcccttcatccctcttttttttttttttttttttttttttttttttaaggatagggtctcatataattcaggctgtaattgactttgccatgtcattaaggatgatggccttccaaccctgatcccactgtctgccaagtgctagcaggcatgcactccgcaaacagctcttcttcattcagaggtgtttttggtattgtcacctacaaattattcacaatgccttccctttactgagttcatgaaatgttccaataaaattttattaaaactataaattagtattagtgtctttgtaatattcagctttaatattcagaactatatactattttccgttatgaattgttatagtcacaagtcaatcttaacatggtgtttgtatcccagagttcctgggtataagtggatcatggtcatgtttggatttgggattggttcaattctattttccaaaattttagtagaaattctgtgtctcttctacttaatgtttgcaattagttctgtttccttagcggttaatagtttctttgaagttattttgaattttcaaggcaattacattatcagccaacaataatggtttagtcttttctcttctaattgtttaatgtttcattttattaattaaaatttctagatcatttaagtgatcattttgataggaagcatactttttgattatatgtatggaaatactatcattttttcaaagttaaggtttggataaatatactttgatattggtaaagtaaattagaattttattttctttgaatattagaattgttttcaagttaaatgtgacatattgaaaaacgttatgaaactctaatttgaaagactttgaattttcatgtaatgtatttttaatttaaattaatttattgcacatttgttcagtctttactttggatcagaaaaaaattcattatacattggaatttaaagacattggcctttctctttaaaaggttatataataatttggaaaatgacaattaaataacttaaagtcattgatttcttgttgctaaataatgcttacattatcagtaaacaatttaaatttaaaatttattaagaaaatatcaaaggatttttatatttaatatttcatatcactatgtgaatgttaaagattgtttaaatataaaatgactacagtcaaacttttggatttttacatcaagaatagtgattgaattctaactaaaaacattcataaaatttggtaataccccactaaatttcaaggctcaatagcatggactatatagatcctatcaaattgggaaactggatgttaaacatagttaaccactgtctctggtaaaatgactgaaatgacacatgtgtgatactgtgattggaatattgttgatcttaagagtttctttgaatcaccaggtgagatttcagtaaatattcacacaattgtggttttggtactaattttattgcctcaaatcacttaataaaatgtatcatgattttcctaccttgtgatacaattcatcatagttttaaaattctttttgatattactcttttagacagtatatataaatattttatattttaagatatgttcttttgactagatcctttataatttaaatacataaacttataaatatttactgttaatttttatacattaagctagttattatgaattataataaagaaaataattaataaataataagacacatactttcaaagaacttgttttctgcttggtagatatgaataaggaaatataaaacagattgcagtgaaataggtattccttagaaaaagtattaaacatgcaatttactggttgcatatttaccttcctctgaaatgagctttttttcatataattgttatcttttataattatgtaatgacctgttgcttacacttttacattttgtttctgatattttacctcctttggaactacactggatatatatattcacatatacatatacatatatacatacatacatacatacatacatacatacatacatccacatagtattactggtgataattcctaacaaaattataatacctgatttcaacagaatgtgtatttctaatttatataatctctctctctctctctctctctctctctctctctctctctctctctctctctctctctctctctctctctctctctggttgtttgacacagggtttttctgtatagccctggctggccttgaactcagaaattcgcctgcctctgcctcccaagtgctgggattaaaggcgtgcgccacaatgtgcagcatatctcttatattttataaccttgtattcttatttttgttaaaaaactttcataaagatccaatttaactgtatgaagttgttttcagaataaaagttgatgctacatagggataagattagtatatgccaacagccttgcattgtaaaccttttctttcattaaagagcttgtccagtactgtagaatcactcaccaaagaactgacttgcaaagtaggaggaatccgtgtgctgatacatctactaaaagtgatgccagcagaaaatgctggtatattaaggtcaatgttttcatcttttggacttaaattatacttttttgttgtttgttttgtttttgctattattctttatagcttaccattttaatatgtaggaccagtttcatattcttaaaatgttatcatattttgtaatattttatcccttctcaactttatacgctgtcatcaaatgatattcgtcaccaaccatgatagttgtccctatggaactgttattctatataaatctatttattaaaaaatctatatagcttccagatctggaggcctttctcggccttactgtgagcctcctgtgtggtatcctttgtttgaggtcttgttaaaatgtaaataaattatgcacagcacacttcctctatttacccaacttagtatattgaagcaactgtcttgatggagcacagattgatatgtagtgtgtttctgtactgaaccaagtgaagaaggcgttgtatgaatatttaacagaacctacttcataacagtttttaaaagtattttatgaattgtagataatctgagccatgggatatgatgtcattctgcataacagagttcatagaaagaagatgtctcctcaaacagaattggattaggctcctgagaaatacatgtttgggcttttatagcacttaaactttataagcatatcccacatttaattttgcatattactgttgtagtactatagtaaatatagcaggaatgaaaatacaaacgtaaggatgcttcctagaacaatttgtctttactctaatgcacttttttctctaacgttttagtttcaaatatgccattttgtttctcttgaaaagcaattgctaacctccataaattaggagaaaatttacaatctgtgtaatgcccccctctctctgcctgtacatatatttatatatatatatatatatatatatatatatatatgcatatgtatatacatacacacacaaacacctatatatcatgtgtgtcatgattagatcaaacaaaatctatgaaataacaagtgataatatgttacttaaaagttgataatatcaagcctatggaatatagatagtgctacttaattgatatgttaactttagaaacaattagtgtaaaaattgctcattactacactacatataaatagtgagatgaagaagcaatttagtgatgtacagtaaatcaaatttagcaaaatgaagctggtattaaagtttatctcattggaggctagaagatgttttagtggctaatgtgctgacctaatcctgagatcacccatataagaaggtggatttggtggtgcatgcctgcttgataatcagaatgaggaagactcctatattttcaggccaggccaatcagcaggcttgaaattcagtttgaaaccttctctcaaaaataaaatgtagagcgattgaagaataaacaggatattatctctgtacacatgtgcacacatacacaaacacatactcacaaaaatgtatctcattggaatagtatcttaaattacagtagtggtgattattattgtacgaacaaattattgatgcctgtaattttcttatatatttctgtattttccatcgatttttcatgattattattgatatttattaactgtcttctttggcagctctaaatatgcatatgatacagtctagttacctgcaccccactctgttctctctctcaccactgtcaacctgtacccttgcctgtccatttctcacattcatgaagtcttgactttgtcttatggaccactacatttaatgaggcccatcgtgtaaccatgggttttgaactcttcatcagagccttctgagtttaccctgactatacaagtgaagtcaattactggctctacctagcatgagttaataattcactagggtcagttgtggcccagtgaatctcccaatctatgacagactaatgacaggcccatacccaaggcaggcaactagaactgctctgagatcctgattgcagtgagtctgccttgtttggaaagtaacatttcctgtccattttctatcttcctgctcttgcattctttctgcccataacttcctactcatatattccttcattccttgtgcattgcttcctgagtgctaaagctgatagtttaagtgtcctgtttttagagcttgacactcagtcatcacttttttagtatatgagtcagcatactctacagttcattgcaaagagaagtttctctagtgagtcttgaagtagcctttgtccatgcgaagaaatgtgaatatcaacaaagctttttgacatcgtgactctttaaacagctctagtaagtatccatctggacctaaatcatctctattccaggcctttgactgggtggacagtactcagcatgagtgcctttttatggatagaccacaagtccaatccatacagtgatgagatatcacaataatagtcactttttttgccagtggacaattttgctgggcaaattttatttgcattgtcgtttgcaggattcacagctggctagaacattgatgagttttgtcccagggcagcctaaactgcaccttttatcactatgaaagctagccagaacagaagaagcttccagatcagttccagcttgatttctctatatcttgaaacaaaggtatatcttcagcaatagagttgctcaacttctggtggacaaccaaaaggcatggtaagagcatgtagtttgcaggaaaagatgcatgttcaatgagaaacttttgtacctagtcttcttgtatgttgttatggcttgtactcttggtatcttctagcccttttggcttttacaatctttctgtctgctcttctgaaggcttccctgagctcggaggggagggatttgatggagacatcccatttagaagtgcgttctaaggtatcttccctctccctctacctttttcctcctctctctgcatattatctgactgtggctgtgggtctctgtatttattcccatctgttgcagtagaaagcatctcttgtgatagctaaataatgaagtgatctatgactatagcagaatatcactaggagtcatttttatcactgcttttttcattttttattatatattttctttattnnnnnnnnnnnnnnnnnnnnnnnnnnnnnnnnnnnnnnnnnnnnnnnnnnnnnnnncccccccccccccccgctcaccagcccacccactcctgcttgctgcttgcttccttgtcctggcagtcccctacactggggcatcaagctgtgtcccacaaggccatcctctgctacatacgcggctggagccatgggttcctccatgtgtagtccttggttggtggtttagtccctgggagctctggggttactagttggatcattttgttgttcgtccaatggagctgctaaccccgtcagatccttgggtcctttctctaacttctccattggggatgctgtgctcattccagtggttggctgagataggaaatcacagaaccttttcaacagaggaatctcaaacagctgaaaacatactttaaaaaatgttcaacatctttagccatcatggatatgcaaatcaaaactactttaatattttatcttaaacctgacaaaatgacttaagatcaatacaagtaactgttgtgtgaaatattgaaaaaatcatgcacccacactagctctagctaatttctagtaaagggattttatcgcttccagggtctccatggtccccattgttggctgcccatctcgcagttctcttgaggtggatcctgctcacattcccagtcatctgacccccgtggttagctgtcacaaattcccataacccagtaaaatcaaaactgtagaggcttataatttatcagtcagatttatatcagttgattttcaaccctcaaaacgcccacacaatgaactcggagcccattgatataaactgtccacctaggtaagacctaggtggacagtttatatattatatataattacaggacctaagtcctgtaattatccatcccttataagatgttcataactacttgtaactatttaaggccacatgaaatctggttcatctttctcttcctacatcttcctttcttcttgtgtcttcccatctctcccatctttaaaactctcaacccactttctttatccactgcccaaacacaggctctagccttatcttgtatctacccccacctgcatatagacagcaatccacatatccctgcttttgtccagttaaaagactctttcctctcaaatataaattgaacacaactattatcattttgtaatttataaagtataagatacacctaacctccagtccactatatttgtcagttaactagaacactctgttatctatccttacttaaaaaaggcttacaatagttctgaacaatagttttagaagttaaaggaaagtaaaaacaatcttgcaaacacaaatagaaaaggtggttgaaagtttacaggagagtcattcattaatacccgagttcttagagaaacaaagtcagaagtcaaagaaatttttaaaaataaaaatgaaaataataattaattaagaattttatatctagcaaaactatctttaaatattaaaaaatcatatttttcagatagtttattaataataaaaaattttaagctaaaaggaattgagaataaactgtgactaaaatgtaccaaaataaatcagacagtcagccccagtaattatgtagtaccactgtttgtatatgagtcacttgttaaagatagagtccctaaggaagatcttgatgatgtgacagaacctagtaggaggactttatgtgtatgaagttgttgtcttgtaagggcctgtggatgttactggttcttagttttcattatgtttcctgacctatgtgttgaatgatttgctgtaacatagtctctatctgtgatatgctgtccattctggggcctccaataagttggcccactggatcatttaatggcactttcaaaatgtaaaagaaaataattttatatttttataagttgctatttacttcattacagttacagtaggataagtagcaagaataggtaaatatatagtataactgtataataagcccaaatccaaaagaaagaaattaatagcaataagaaattcatagactagaaaagaaaaggtctctgttggtagtgtttgatgctgtggtgtctcagcaataattctctgctcccaggcatgagtccttggcttcttacctcaaaagcatagtagtcttcacggtgggaaagtgaagaccttccccagggatgacccttccaagcctttccacctcacatcgttgctagtctgcaaagctggcatgacccacatcatcagtgaagtggacaggcaggatccaaggtgatcaaaaagaagttgtgtaaggtgtaaccattgctgagacaccaccaatgctggctgtgggcattgtgagacaggtggaaatcctttgtaggccctctgcaccttcaagactgtctttccctcacacatcagtgacaagtataaaaggtatttctacaaaaacacagaaatgtaaagagaaggccttcaccaatactgcaagaaatggcaagacagcataggcaagagaccactgtaggaggacttcaataacacaaagaatcactgccaaggcatccacattagttgccaccaacagatatgtgtgctccctctgctccagaagaaggtcagcttaatggagatgccagctgagtatgtcacagaggctgagaaactacactgggccctagggagactgtaagagaaagatgagatgatatcatcagggtgaccaaaggaaatgctacaaagaggactctaattgctggcctgaaaagaagctactctgtaaaacccacctagggttatccaagttttcttgtattagagcctggcaccctccctgtgtgaccttctctgtagcttgagccagccaaaaggactatcatcttaaaaatctataagatttatcaggggtagcttatcaagggtggcaagctgatcaagaacaatgtttctgcatgttcaaatatgatctatcttactagagcctcaacttactcgggggcattgtcagttatgttgaaatgaccagtgactttgtgctgctgaatggctgtgtggtaggaaccaagaggcaaaggtttctgcaaaaccctgctggtataaaccaaatgatgagctctggaggaaacacatgaacttatttgacgccatctcaggattattgatggtcatttccagaccacataagagaagacagcattcatgggaccacccaagaaagaccagattgtcaatgaagaaggtgcttaaatgtgctagaagtaccttgtacgtctggtcaggtctcaataacatctttcccaatggcaaagcagaaagggggcagggaagggaggagggaagagaaagaaagaaacagagaaagaaaaaaggaagggaacgaggaaaaagaatttcaagaacaaaataataaaatcagtgaaactggcagaactttagctagactcaccaaagagctgaagataataatttaccaagatcagaaatgaaggaggggtagacagtggttacaagaaaacccatagaagtcaaaagtattctaagataaaactatggtctgagacattccagtttcagttggcaattcagttaaacggaacagcctggaaatgttcaggttaagaaggctacctagaaagagaaatatagaacttaggcctataaacattagataagtaaagttgataaggcaagtgagaaaagagagaaggagggggaaagaagagaagagggaggtgggacagactcactctaaatactgatggtttccttgataaattctaccaaaaaaaaaaaaactaaagaaaaattgcagtcttttacatagtttttgtgaatatagtgggaggaaatagatcacttttaaaaaatgagaattaaaccttgaaataaatagacaaaattttaaaaacaaagagaaaaaaacaaaatcaattcctgtactgaaaatagacagcaaaatcttcgacacactattcaaatatagtaatataggaaagcatttgcacaccctgatccagtaggattcttcccagaatgacttagaatccaataatcaatcaatgtacagtaccatattcagagactatgaattgaccatcttaatggacatatgagagcatctgtttgtttcagcagtctcaatgatctaggaacaggggacttctgaccctccaggagacagctatgaaaactctaaatataaatatattgatagaatctcactgctaaggtggaaaagcagcaaggctgtcatatctaacttgttgcatgtgctgatatgataaacttgagttcagaatgatgagacatggaaggaagggagaaagggggaaaggaaggaaaagaaaagaagccctaaagaagagaagacagtagaaaaatgaaacttaaaaatgatttttatttgtagataatataatatgacatatacaatattaagtatattacttaatttatgtatattacataaacacacttatgaactaattaggagtttggcaaattaactatatataagttcattgtagaaatcagttttctttttgcataccagcaacaatgaaattacaaaaattccatttgcagtagcatcaaaaataatattttttcagaagctgataagttaattctaacactgaaaataatgtgaaacttaaattactgattaaaaaggaaccaaaattagattacatacaatatcttatcttcaaacttattgttcaaaatctaccgagggagagaccctgataatcctttatagatcaatggaatgaagttgagaggccagaaaattaagcttgatttttggtcagatagttttcacagaggtaccaaagcaatttggcattgccaggtaaggtgcaaagaccatgtgacttcttatatattgtagatatttacctcacaccatccatgaacattagctcatagacctaaattcaagagctagaattatgaaacttgaagttgttagagaagaaaatctctatgagtttgtatcagaaagagtccctagatatgccattaaaaccttgattttaaaatgaataacagcctagtaatgactggactggcaagctatacccactggtgtgatagtggcatagatggatttaatactcaatgtgcaaaatagaatccgttactgatattgttaactaggccaaagctttctgactgtctaggtcgtaggaatagggaagacctaatactattatttttcaaaatgaacattgtattaaattgtcccctaaattgccatctttatacccataaattagtatatctctcaacattcattgaagaaatttcttttttccattaggtgatgattaatagagagaacaatagctactcagtctatgacaatcagtactatatcttttcctccctggattcatggattattgaatagagggcagaaggagtgtaagcgctagatagtggacattgcaatgaagtattacttattgaacttggtaggacaattgcctgcatgagctcacagaggctatgacttcatgcacaacacctgtatattatgaagccagccaaaataccagttaaaaagtcccatccctgtctgagtatctgtttggtaattaatgaactctttttcatatatgctgccacttgaaagctacctgtgtccagtaaaaggttctacacttttgtgtacacagcaacactaatcagaccctttgcttttaaaacagacacacatgtgagcatacacacaagcacacacacacacacatacacacaggggatcagtgagaaacatgaagttggaaggaagaggaaaaaaattggaagtaagaaaatggaaaatgagtttgaaatgcatgaaattttcaataaaaatgtgcctacagaaaaagaataaattgataacttgaacttcaacaaaattaagaatttgtgagtttcatcatagaaatcagatgataaaacacagataaaaaaacagacacaagatttttaatagattgacaagtcatccttttaacataattgttatggttatttataaatcataaattatctcataatatatttggaaatattccatggtatgataaaaaaatccattttaaactgtcaatattttgaatatatatttccctgaagaagaaatagaaagtgccataaaaacaggaaaagatgcccaacatgattaaacgtagggaaaagtaaatttaaaccagaagataccaattcatactcctgtgttagttatagttctgctttttaaggcatttacaatatcctttaagatacagaaaatagaaccatccaacccagctagtgtgagtgcaacattgaatattttatttcaagtatgtagtaaatttcttaacaatgaaaataaatgaaatctgagagccgaataattccacctctcagtgcattccaaagatatatatatatatatatatatatatatatatatatatatatataatttgtatagaatatatatgtttcagctgacaaattgacataaaaatgtgatgcactatataaactccattcagcagctaaaatatatggaggcaatctgaactgtgacaatttcttaaactgtattgtgtttattgttgaataactatgaatgtactaaaaattattgatagtaaggataatatgttatgggtagttttgattgtctttttgacacaatgtagaatcaccttggaaatgagtctcaatgagaaattccctagattaagttggcctgaggttattcctatgagggattttctaaatttgtgtccctggggtttactgtgaatttggactgtactattcttgggttgggccccagggttaatgcagtctagagtgcctgtagtgttagcatgcatgtattgattcgtggttcctgtctgtggatgaactatgactagctacttcaggttcctgctccttcgtcttccctatgataatggactgtaatttgggattgtaagctaaatgaaccctgtctttctaagttgattgtgtcagtgttttctttcccaggaacaggagatgaaagtcagacatatgttctataagttatgctattatatagtgctaagataaaagtgtttattaaaagtataaaatggcggttatctcttaacccagtaaccaaggttaccatcctcagttatgtgtcatgttgacagcatgcactgcctaatattataataataaatctttttgtatgcaatttggtaagtcataattccagtttattcatgaaaaagtactagcaagtattagttcaataactgaaaataatgaaaaacaagcaaaaaaagacaaagaccagagaaactatggacacatggaaaagccatgcagttggacattcggaatgggattcttggaatataagaaagataatcatggaagagctgatattacttgacatcaatagaccatttactaacattaaagaatcgttttatttcaggtgtgaaaaaagtcagttatgtttacaaaaagttaccttttagggatcatagtaaatcctcaatgggtgagtgatatgctatctggcattgccttgtaaatgatctggtagaagaaacactggcagagacgaggtggaaaatgtgtgcgcgggcagtacgtgcatgcaaccccctcactgtacattttactctccatgtgttcaaaattttccataacgattttttcaaaaggaaaattcaactgaaaagcaaatttctctattaacattctatgctgaccacagtcactcacatcatgtgtctttcaagagtcaagtatgtacagtgtcaaagttaataagccgtaaaagatctactgaacatgcaaaaataacccaagcaaagattaaaatcagggccaaatactcgggaggacattaggacaagtgcttgggttaacaaacctcctagctggggttctgcttgtttttcccttgaagctctggggcctactcataagtggatggatatctcaatgcctatctatgtgaggatttggaaatgaggtagactgtggttagaagacacctttgttcctgttcagtgctgggacccaaggggtttcaccactctgtggttttgctgtttgagtaagggctttgtgtgtggccttgtgacttgtagagtggtcagatgcctcatttgctgcttcttagagtctgtagagcatgtagtgcaaagtactgcgctgtttcactgaaggctgtgtgcagaaagaatccttctccaggacttcctgatttacactgaccccactgtatcattggctactgactctactctctaaatcctcatagttttactcttcttagaacatttgccaacagtgttcatgtcactattgcctaagattcattttttaaaagagtttagaaactgatgtgtcaggagaaattcttattcacaacacatgcttcgtagatctgtttttaaggtggatttagatctatctttaaggtagattccatgcacagttgtgaacatgaaagctggaagatgaaaagcagaggagggcagctctaataccctcttctgatttttctgctcctccatctcagtgtgtcctcagagttttgccctttgcttaatgatctgccttcaagcaatttctacctaatattgcgccctactgctaactgacagagctaatagtttgttcatgtggcaatgaagaggagcagtattcatatcaaagacaactggtcccacttccaggtccatctttgggccaagatacgtagtcgccaacagtgagttggcgactgtatttttcgagtcctggcgcaaagcaagatccatctgttttgcccagccgtttgcctgagtaccacagaacagtcctgttattaggcttatttgtggtcctatttgaggttaggcataatgtaaataaacttcagtcctccttgtgatgaatgcagcccaggaattaaaagtggtggtattgggagtgtaagtggggctgtgtctgcttgctcactgctctgctttctttgcatggagaaagagacatttaagaatgagtttgtcatctggaaggatagttgtgaccaagtttccctcaacaggatacaagatgttatttttgagcttcattaccctcaccagagagagggagagagaaagagacagaaatggagaagacagccagtcagagaggccagggagggagggagggagtgtgtgacttcatgcgtctcttcacagtggactttatgaatttgaatggtttcctttactccacatctgctgggttgaggaaaagggaatctgacagaactgaactgctgcttctcagttaaatcggctaagtgtgtctatttgatctgattccactcacctttcctgctccaagccacacaatgagtctgtttcactggccacattttgttggtgagaacaataccaggtgggattcagatttatctagaaatggacattttttgtgtttctgaatcatttatcaggggttattgttattccatataatttttgagcacagttatttttgtcagtgtctttcatgaatgtttggttgccttataaggatctctgtgctctcccctcctctcattcagttgtccctggtgacgcctccataatttctgtctttacactggtgcatttttagtctaattcaggcatttgggaagcagagggaaagtttagtaagtcagtcagtattttttttctaaaatctaatcccattcatgggtggttttagtatgaattatgagcaagtttgcatttaaaatgtatgtacatcaaatagacacattgctcaaattattcttccatatatttcaaagaaaaacaggatctgcaagtgagaaccagatgcattttctaataataggtgcaatttcaggggtgatttatgattatgatctcttatgtggaaatattaaaatattactttgcattatgtgagggtcagacataaacctacaacaatcagggcaaaaatatatatttaaaatactgcagtatagtaaaataaggaagataattatgatagctccatttaacattttaaaatacctttttctaaatacttatgtgttagttatttgaagctaaaaataggaatgacttaatgtagtatatatgtgactcttttattgctagtacttgtagaggatgatgttggaagaaaagattgaaaaagaaacagtaggatgttttaagcccaaagttgtgggatacaattgagaactgaatgtttggactcttaatttgaagattaaaggttttttttttaagcagacatttaaaccaggatgtctcagtcataattttcaacccttatgaccttcccatgttacattggtgacaggatggtacacaaagtacagtatgatgtgcagtggggcacaggcagcccctaatgcagtgcggtaggcattttgcagtttgtgttgctaactcaattggtttacctctaatttgcagccttgccccataagtaaatcatctgaaaccacctattagtgtttttctaatttctctcagtcataattttcctttaacctgtatattcaatccatcgatatccccatattgacctatgattgtaatggtttccctactctttgggttgtgaagttcttctttgggatgtttctttttcctctaaattgcttgtattgtaaataaattcactgtaggaaatgtctaccgataccacaatgcagccctttacatggagggagatttgttttttttttttttcagaattacctttgtttcatctctagatccttttattttcattaagaatcccagggaaaaggttttttttttccctctctcttgctcgctctctctttctttctttttcccccttaacagggataaaaaagctccgcttgactgataatgcattgctttggatggggaaacattatgaaagtttaatttttaattaaatctgaaataccaattataactgaaagagattttaacctgtttcttttcagactgcctgaagttacattttgagactgaaatcactgcaccttaaaaacaaaagattgggctgcactgtgttcctgtaagtgggagcgtcctttaccttcctctgggttttctgtgaccaatccacaaagagacaaaaccactgctatcatagtaaccagtcgagagggaacatctgaatgtccccaaagaaatatatccttaaatgatttcctttttaaaaaaagttattgagctcaatatttcagggtggcttttattccctcgaaattatgaaacctttcttttggcaggtttgaatttcattagggagggtgtcgcccactgtgcatcagcacggtggcataaatcctgtgtggaaagatgtgtgcattcttaaaccagactcttaagaggtaaatgaattcttttgaatcaaagtaaatttcagtttctttggtgatgtcactcggaatttttagcctttgtgtcaatggaaatggaaagttcctgatgacatcacaggattctatagcctgaagatttggggcaaacctaagtaaaaatgcataattcccttgtgtgcgtgtgttccccattctgctatgaaacagtcaaaatagcacatcttatgtcttcccgtgagctacaaggctgtctctcagagtcccattgttccataaatgcatgtcagagtctaccacagtctgctctacccttatttagctgctgttttgtcaatgtacttggaagaacaattaacatttgggatttcagtgtctgaataacaggcagtgaatagaactggagccaataaaagattcagatgcccagggtaggaaacacaagcttatagttggtgggagagagaaagaaaagcattttagtgctgcattcagggtgagaaatagtatgaggaaagaggctttacatgtattggatcaaaataaacatttttgtaataaagtcaggtttcttgggcctcctaagtttggcagtgtggtattttctgtcagtcttaagcatcagtcttctgtggaagtgccgaatgtggtgtccttacggtgtcctggtttctgccatgcaggtcctcccagagggccagaccattcctccatttcacttcacttccttcgctacagtctttgattagtgtctgaagtcagacctaggggttaacatgtctgcatcctttgtctgatgactcttaagttcttttttatttgttttgttttgcttttgagagaaatggaaccgagggcaccttggcatcttggttttgttgccgatccagactgaaacataagtaatggttgctaattttgttataattacaacagttcaagcctctagacagtaaggtttcaaaaagtaaggccattcactttttaatccccaatatttatcagtgtaatgggtaaatacacataaaaagctatgttctcagtatgattaaaaacattttaaaaagtgagaaatctgagattacttacagtaaagaggtatctggtaaagtttctggcacttaggaaagggataatgaagaaaatcatttgctatagactctgcttctattcatagcagacaaggtgccagcctcctgttcttttctttccttgcttatacttactttcctgactcaaaagagaagtacttattcatatatatccattttgtctgtggcataatcttcaggtgttttctatgtaaagtctgcattatttttcatatactagaattggcttcaaaggtaaaaccacccggatggagagaaattggccttgcccatctctcctggtggctttatggtagactgtgtttgaagtgaagcaagtagcatcgtggatgctggttttcgaagtgtcttgcaaaattgctgagcagatactctttccattgagtcagacatcaaaaccagttctcaacaccataagatcacaatattctttagaactcagactatcataaaacataacagcagcaaaaaatgtgaannnnnnnnnnnnnnnnnnnnnnnnnnnnnnnnnnnnnnnnnnnnnnnnnnnngaagggagggagggagggagggaagtaggggagggagggaaggcatctcaattgaaatcagtaagctgaggcacaggtaatgcgttcaggtgtggaaaccatattgactcccaatggagatcattcttaagcatgtctccctgacagagaccaacccctgatgtgaaggctgaatggtttcatctaaaagcagtgtacacaatgctttatagggcacaaatatcattttgataatctttgaaacttactgtataccaagtggtataaaattaatgaataaagtaaaaatcagaaaatattatcaaaacttcattatctctacacattttgatactatactcttggttatgccccttggcctttatagacaaatttactggttcacttaatattcattatggtgattcagaaagatggtccattagaaatgtcagtagttactcggcttatagttttgaggataaagccaggaatctgaacatggaatttagacttaccagcagtgtgagtggtgttaaaatgtagctaaagtcagagctcagttttgtagagaacacttttggggtgttaggactggaataaaattaaataattttaaataaatttgttaccatgctaatttatttcatactgcctttattaatgctgtaatttcacaatgcagagggatgtatcagaacttttctattattttaccgagagtctgatcctagacctatcataatttgtttcacaattcagttttatcacatgcatgccttctccttctaccataagaagatcaaatcactgtgtacaaaagctaataacctctgtctctgtgccccaacaaaatgaaacagttgtacttttgtaaatatccacggaagctgtagcatacagaggagaaatcatgtcattggaatgtcagaggacaactccagaaaaaactcaaaaaagtgcgctcctcaaacttctctctcttctccatatattaacatgtattgtgtccccctgtgaacaaaacatgttcattaacacctatggcatgtaattaaggggtttttaatgtatttggtaaatcttttaaaaaatggaatcattaattcattcttcaattctacttgatgttccaacatgtaataaggaacatgccccactatgttcatagcagccatatttatttatttatttattttttacatttttttgtttgtttgttttttcttttttttttctctctctcttttttaattaggtattttcctcgtttacattttcaatgctatcccaaaagtcccccatacccacacccccaatcccctacccacttactccccctttttggccctggggttcccctgcacaggggcatataaagtttgcatatccaatgggcctctctttgcagtgatggccgactaggccatcttttgatatcttttgatacatatgcagctagagacaagagctccagggtactggttagttcatattgttgttccacctatagggttgcagttccctttagctccttgagtaatttctctagctcctccattgggggccctatgatccatccaatagctgactgtgagcatccactctgtgtttgataggccccggcatagtctcacaagagacatctatatctgggtcctttcaccaaaatcttgctagtgtatgcaatggtgtcagcttttagaagctgattatgggttggatccctgcatatggcaatcactagatggtccatcctttcgtcacagctccaaattttgtctctgtaactccttccatgggtgttttgttcccatttctaagaaggggcaaagtgtcctccacactttggtcttcgttcttcttgaatttcatgcgtttagcaaattgtatcttatatctggggtatcctaagtttctgggctgatatccacttatcagtgagtatatattgtgtgagttcctttgtgattgggttacctcactcaggttgatgccctccaggtccatccatttgcctagcaatttcataaattcattctttttaatagctgagtagtactccattgtgtaaatgtaccacattttctgtatccattcctctgttgaggggcatctgggttctttccggcttctggctattataaataaggctgctatgaacatattggagcatgtgtccttcttaccggttgggacatcttctggatatatgcccaggagaggtattgctggatcctccggtagtactatgtccaattttctgaggaaccgccagactgatttccagagtggttgtacaagcttgcaatcccaccaacaatggaggagtgttcctctttctctacatcctcgccagcatctgctgtcacctgaatttttgatcttagccattctgactggtgtgaggtagaatctcagggttgttttgatttgcatttccctgatgattaaggatgttgaacattttttcaggtgcttctctgccattgtttattcctcaggtgagaattctttgtttagttctgagccctcattttttaatggggttatttgattttctagagtccaccttcttgagttctttatatatattggattagtcccctatataatagcagaagctggaaagaactcagatgtccctcaacaaaggagtggatacagaaaatgtggtacatttacacattgaagtattagtcagctatgaaaaacaacgacttcatgaaatttgcaggtaaatggatggaacttgagaatatcatcctgagtgaggtgatcagtcacaaaggaacaaacatgatatgtattcactgataagtggatattagcccaaaagttcagaatacccaagattcaattcacagaccatatgaagccttagaagatggaagaccaaaatgtggatgcttcactgcttcttagaagggagaacaaaatactcaaaggaggaaatatggagacaaagtgtggagccgagactgaagcaaaggccacccagagagtgccctaccaggggatccattcatatatagcctccaaacccggatgttactgtggatgctgagaagtgcttgttgatggaagcctgatatggctgccttctgagatgctcttccagagcctgacaaatacagaggaagaagtttgtagccaaccattggactgagttcagaggtccctgatggaggagaagggactgaaggagctgaggtggtttgcagccacatagagggaacaacagtgtcaatacaccagaccccacctccccggagattctggggactggaccaccaaccaaagaatacacatggagggacccatggctcttgccacatatgtagcagaggatggccttgttggacatcagtgaaaggagaagcccttgggcctgagggcgttagatgccccagtgtaggggaatgccgggagaatgggagtgggtgggtgggggagcaccttcatagaggcagggggagggaggatgtgattggggggttctgaaggggagacctggaaaggggaaaacatttgaaatgtaaataaagaagatatccaatttaaaaaggcaaaaaagaagaatatagatatgagctctgcatgctgagctgtatttacaacctcttaaggtataagaaactaactcagtgcacacatcattacaaaatgacaaattgtctccatgaaaagtactgtgtatgcaagaggatagttggtgaggtaaggctaattgtaatcatcattaaagcatcagttctgaggttgaggagcctggctctcctgaaatgtaggcctaaggtaggacgcatttcccatatgtataaacagagaatgctgacaaccttccgagataaggccaagctcatttcctttgtgattaataattattaaagcctggttgctggttaacccactttttaaatattttacagtattctttacataagtaaagaatatgtgtcaacaatatcttttactcctagattgtactttttcctgttaaatcttaaccttatcttttaatgtggtatattttaccttatgcaattaacagtggtctagaaacaatgaaagccttgaaaattgttactttctacagcaatactaaatttctagattgaagaacaaatcagatggtcttaaaacatgttaccttagtatcctaggaaatcactaaaccagaacagaggtagtggtttgttttcatgatattgtaaattagccttttcaattaaaaacaataaatagaggaaattttaatattaggctataaaaaagtaggttatgatataaagaaatgaaaattatctgtcataattgagatagaagatatcaccatgggaaaacactacagcagccaagaacctttaggttctttttcttgtcttcttatttcggagatgagcaaaattcaggcctaggattcatatctaagttacacagttaactatacagccatctaattaaatacttaatagcccaagtgggaaagctggacctgtgagccctaattcacattaccacatgcaaaccccctgatggatgatcacagtccccaccataaccctgtcacctttatgcagaagcctctgttaatagaaatatgaacaacataggtgactctcagtttgtttacttaatgtaccagataccttttaaaagttgtcattgctactcacattgtagctattcatcaaaaaaaaaaaaaaaaaaaaaaaaagaagaagaagaagcatttccatgccctaatgaagaaacggagtcccagagagttaagtacttataagaacataacactgatatgtgagtttgtatcactaccaggccttacaaatcctaactcagtggacctctcttacttagtatttttacctattgcactttagtatctcagttcatgtgatcatacaacttgttagttttttaatggtcaaaacatctttaaaaactggggggggggggggatgctaagaaagtaaagttgcatttccaaagtatatcctttttctataaaactgtcacattgaattctgtcacatcacagtatcatgccaagacaaattagcttcagaaacccatgtgaaatcttgagtcaacattcacacagaggccgcttgtttgtttttttgtttgtcttcctgattttgagataggatctactaattggaaggcagaaatttcaattgtgttgaaggtgtagtgtctggagatttgacttagtcttgcccaacacggttgtcatgagtgtgttttcgttgcctgcaaaggttacgttccatcatcttctacacagtatgatgggaagaagtcaaatgatttattatttagatgtctgaagagtgaggatggttcataagtatcatagattcgggtagaaggagatatcacttagaagtctcaggagcaaatgttttgtcttgagtatgtagtggtttgaaatccctttgattttaggctaccatacaaggaagcactgtttttgctaagggttgttcacacactgaaaacaattactgagttgcagtgagatattaattctcttaaacattatttttttttaaagttgatactataacttctataaccagtttcccttaatttaaaaaacagctcacaactgtgtagacttcttatgcactgattttcttgaggggaagaagtgatgctcttgtactaagtttctttctcagtcactgataggccactggttatgtcttcagcaagtattagacatgctgggtcaaaattctgtttacaaagtaagtttagtaagtaataatttcattcattcaactacatattgactattattaaagacttcatagacattcaaacagtaattaatggatagagctgctgaccttcaaggatgatcatagtttataaaatgaaaagaagaaatattttgggtaatggatagtttaagtaaatgtgttctatgcgtgtatactcccatgaagaaagggcacacacttctattcatgctcttaacttagggcttgtctcagaattcacaacataggacttggagaaatgattataaaatttacttgagtattttattgtttaacttgttacaatggacttctatttctaaagaaattttaaaatgaacctatattttatattactgctatcaaagctatcaaagattccctataaacaaacttgaggggaaatatcagatcatccaaatcagaatgaggcaagaaggaactatataatttgaaagactatgtttcagaatggtcatattctacttcctttcaataatagcctacctgcatgaacagaagacatatgtatattaatttaaaacaaggaagtcatagcatgatgaccacaactgatgatttaaaacaatttcaaccttaaacatgagtaaaatactgataggtgcttacaacatggatgaagtaaatctgtttgccacacccagatagtctacatgaattgattgggtgcggtagagtctaattgtatgataggttcttggaggaagcaaattcttattaaaattcagttaattcaaatttagtacacatctacataaaagaaaatgatctctcagagtgctgacttgtttttgccacagagactagtatgttttattttcactgtaaacagtacatttctatgtatccttacatatatatttatgtgatatgcacaccaacacatttagctaataactaactagaacatgtaataaacataaaagttactattactgaagcaattagatctaaaatgtgattgaccaaacataagaagtcgctctcttaagctattgtaaatgaaaagccttcctaaactatgccttaagtttggttaatatagttgatagtccaaaggtaggagcaacccaagggtccatctgtggaaaaacagttaagcagagtgtggtacatatctaggatgaattcagttttttgtttgtttgattgtttgaaagatagaatattttattcacatattagcttacagtgttccatacatatcactttttaaaaaaatatttttattaggtattttccccatttacatttccagtgctatcccaaaagtcccccataccctcccccccactcccctacccaaccactcccactttttggccctggcattcccctgtactggagcatataaagtttgcaagtccactgggcctctctttccagtgatggccaactaggccatcttttgatacatatgcagctagagtcaagagctccggggtactggttaggacataatgttgttccacctatagagttacagatccctttagctccttgggtactttctctagctcctccattgggggccctgtgatccatccaatagctgactgtgagcatccacttctgtgttccctgggcccccgcatagtctcacaagagacagctatattagggtcctttcagtaaactcttgctagagtatgcaatggtgtcagcttttagaagctgattatgggatggatccctggatatggcagtttctagatggtccatcctttcatcacagctccaaactttgtctctgtaactccttctatgggtgttttgttcccaattctaagaaggggcaaagtgtccacactttggtcttcattcttcttgagtttcatgtgtttagcaaattctatcttatttcttgggtatcctaagtttctgggctaatatctacttatcagtgagtacatatagtgtgagttcctgtgtgattgggttacctcactcaggatgatgccctccaggtccatccatttgcctagcaatttcgtaaattcattctttttaatagctgagtagtactccattgtgtcaatgtaccacattttctgtaaccgttcctctgttgaggggaatctgggttctttccggcttctggctattataaataaggctgctatgaacatagtggagcatgtgtccttcttaccggttgggacatcttctggatatatgcccaggagaggtattgctggatcctctggtagtactatgtccaattttctgaggaactgccagactgatttccagagtggttgtacaagcttgcaatcccaccaacaatggaggagtgttcctctttctccacatcctcgccagcatctgctgtcacctgaatttttgatcttagccattctgactggtgtgaggtggagtctcagggttgttttgatttgcatttccctgatgattaaggatgttgaacattttttcaggtgcttctctgccattcggtattcctctggtgagaattctttgttcagttctgagccccattttttaatggggttatttgattttctggagtccaccttcttgtgttctttatatataatgaatatagtcccctatatgatttaggataggtaaagatcctttcccaatcttttggtggtctttttgtcttattggaaggtgtcttttgccttgcagaagctttgcaactttatgaggtcccatttatcgattctagatcttacagcacaagnnnnnnnnnnnnnnnnnnnnnnnnnnnnnnnnnnnnnnnnnnnnnnnnnnnnnnnnnnnnnnnnnnnnnnnnnnnnnnnnnnnnnnnnnnnnnnnnnnnnnnnnnnnnnnnnnnnnnnnnnnnnnnnnnnnnnnnnnnnnnnnnnnnnnnnnnnnnnnnnnnnnnnnnnnnnnnnnnnnnnnnnnnnnnnnnnnnnnnnnnnnnnnnnnnnnnnnnnnnnnnnnnnnnnnnnnnnnnnnnnnnnnnnnnnnnnnnnnnnnnnnnnnnnnnnnnnnnnnnnnnnnnnnnnnnnnnnnnnnnnnnnnnnnnnnnnnnnnnnnnnnnnnnnnnnnnnnnnnnnnnnnnnnnnnnnnnnnnnnnnnnnnnnnnnnnnnnnnnnnnnnnnnnnnnnnnnnnnnnnnnnnnnnnnnnnnnnnnnnnnnnnnnnnnnnnnnnnnnnnnnnnnnnnnnnnnnnnnnnnnnnnnnnnnnnnnnnnnnnnnnnnnnnnnnnnnnnnnnnnnnnnnnnnnnnnnnnnnnnnnnnnnnnnnnnnnnnnnnnnnnnnnnnnnnnnnnnnnnnnnnnnnnnnnnnnnnnnnnnnnnnnnnnnnnnnnnnnnnnnnnnnnnnnnnnnnnnnnnnnnnnnnnnnnnnnnnnnnnnnnnnnnnnnnnnncacgccaaggtattttatattatttgtgactattgaaaagggtgttctttccctaatttctttctcatcctttttatcgtttgtgtacagaaaggccgttgacttgtttgagttaattttatatccagctacttcattgaagctatttatcaggcttaggagttctctggtggaatttttagggtcacttatacatactaccatatcatctgcaaaaagtgatattttgacttcttcctttccaatttgtatccccttgaactccattcgttgtctaattgctctggctagggcttcacgtacaatgttgaataggtagggaaagagaggacagccttgtttagtccctgattttagtgggattgctttcagcttctcaccatttactttgatgttggctactggtttgctgtatattgcttttatcatggttaggtatggaccttgaattcctgatctttccaagtcttttatcatgaatgggtgttggattttgtcaaatgctttctctgcatctaacgagatgatcatgtggtttttgtctttgagtttgtttatatactggattacgttgaaggatttccgtatattgaaccatccctgcctccctgagatgaaacctacttggtccggatggatgattgttttgatgtgttcttggattaggttagggagaactttattgaggatttttgcatcgatattcataagggaaattgttctgaagttctctatctttgttgggtctttttgtggtttagatatcagagtaattgtggcttcataaaatgagttgggtagaatagtttctgtttctattttgtagaatagtttgtgaagaactgggattagatcttctttgaagatctgatacatgaaactcaagaagaacgaagaccaaagtgtggacactttgtcccttcttagaattgggaacaaaacacccatggaaggagttacagagacaaagtttggagctgagacaaaaggatagaccatctagagactaccatatccagggttccatcccataatcagcctccaaacgctgacaccattgcatacactagcaagattgtgctgataggaccctgatatagcagtctctagtgagactacaccggggcctagcaaacacataagtggatgatcacagtcagctattggatggatcacagtgcccccaatggaggagctagagaaaatacccaaggagctatagggatctgcaaccctataggtggaaaacattatgaactaaccagtacacgggagctcttgactctagctaaatatgtatcaaaagatggcctagttggccatcactggaaagagaggcccattggacttgcacactttatatgccccagtacaggtgaatgccagggtgaaaaagtgggagtggatgggtagtgggattggggggagggaatgggggacttttgggatagtattggaaatgtaaatgaggaaaatacctaatttaaaaaaaaaaaaagaactctgcactaaacccatttggtcctgggctttttttggttgggagactattaatgactgcttctatttctttaggggatataggactgtttagatcattaacctgatcttaatttaactttgatacctggtatctgtgtagaaatgtgtccatttcatccaggttctccagttttgttgagtatagccttttgtagaaggatctgatggtgttttggatttcttcaggatcagttgttatgtctcccttttcatttttgattttgttaattaggatgctgtccctgtgccctctcgtgagtctggctaagggtttatctatctttttgattttctcaaagaaccagctccttgattggttgattctttgaatagttcttcttgtttccacttggttgatttcgcccctgagtttgattatttcctgccttctattcctcttgggtgaatttacatccttttgttctagagcttttaggtatgttgccaagctgctaatgtgtgctctctctaggttcttttttgtaggcactcagagctatgattttcctcttagaaatgctttccttatgttccataagtttgggtatgttgtggcttcattttcattaaactccaaaatgtctttaatttctttctttattccttgaccaaggtatcattgagaagagtgttgttcagtttccacgtgaatgttggctttctattatttattttgttattgaagatcagccttagtccatggtgatttgataggatgtatggtacaatttcaatatttttgtatatgttgaggcttgttttgtgaccaattatgtggtcaactttggagaaggtaccatgaggtgctgagaagaaggtatatccttttgttttaggataaaatgttctgtagatatctgtcagatccatttgtttcataatttctgttagtttcactgtgtccctgttcttttctgtttccatgatctgtccattggtgaaagtggtgtatttaagtctcccactattattgtgtgaggtgcaatgtgtgctttgagattactaaagtttctttaatgaatgtggctgcctttgtatttggagcatagctattcagaattgatagctcctcttggaggattttacctttgatgagtatgaagtgcccctccttgtcttttttgatgactttgggttggaagtggattttattggatataataatggctagtccagcttttttcttcatagcatttgcttggaaatttgttttccagcctttcattctcaggtagtgtctgtctttttctctgagatgagtttcttgtaagcagcaaaaggttgggtcttgtttgtgtagccagtttgttagtctatatctttttattggggagttgagtccattgatattaagagatattaaggaaaaataattgttgcttcctgttaattttgttgttaaagttggcattttgttcttgtggctgtcttcttttaggtttgttgagggattaccttcttgctttttctagggtgtggtttctgtccttgtattggtttttttctttattatcctttgaagggctggattcgtggaaagataatgtgtgaatttggttttatcatggaatactttgatttctccatctatggtaattgagagtttggctggttatagtagcctgggctggaatttgttttctcttagggtctgtataacatctgtccaggctcttctggctttcatactctctggtgaaaaatctggtgtaattctgataggctttcctttatatgttacttgacctttttcccctactgctcttagtattctatctttatttagtgcatttgttttcctgataattatgtgtcgggaggaatttcttttctggtccagtctatttggagttctttaggcttcctgtatgttcatgggcatctctttctttggttttgggaagttttcttctacaattttgttgaagatatttgccagtcctttgagttgaaaatcttcattctcatctactcctattatccgtaggtttggtcttctcattgtgtcctggatttcctggatgttttgagttaggatctttttgcattttccattttctttgattgttgtgccgatgttctctatggaatcttctgcacctgagattctctcttccatctcttgtattctgttgctgatgcttgcatctatggtttcagttttcgttcctagggtttctatctccagtgttgtctcactttgggttttctttattgtgtctacttcccttttaggtcttggatggttttattcaattccatcacctctttagttgtgtgttcctgcaattctttaagggatttttgtgcttcctttttaatgtcttcgacctgtttatcagtgttctcctgtatttctttaagtgagttattaaagtccttcttgatgtcctctatcatcatcatgaggtatgcttttaaatccgggtctagcttttcgggtgtgttggggtgccctggactgggtgaattgggagtgctgggttctgatgatggtcagttttaaaaagaaatgaaattctcccatatgctactcgatggctgaaaagtaataacagcatgataagtaaatgcacagcatgtgagccagccagacaagggcaaatctagatggttccgtgtccataacatacaacatgcccacatttaatagcaaagagagttagaatgggttttctgagaactgtgagtgtgcaaggtatggtcacagaggattgcattcaagacagtttttaaaaactggacatgggtatttggaatggttggataacaaaggggatatacttaatggcactgcgccttagaactaaacacagttaagttagcaagttttatattgcattattttttaaccataaagggaatgcatttgaaagttttaagaaattgtagtgaaagtggaatgtgattgcatagcttaaaagcacaactgagctgcatactctggagaagcattagaagagttaaggtttatagtaacttattagcttgaaaaacagtctctactttgctcctgagactaatgtatttaggaactacaaccctggaattatccttgattcacaagcagtaatgatggtagcaaacgtcgggagactatagtatagagaagcagacttctttccacctgatggacatgcatggaggctctctgtccagctgttttccatcttagcagctcatctacttgctggggagagccaggatcacgttgaagctcacatttcttcagaaattcaatatgatatcaactgatccttttgtttcctgaagatgttttaatattcatattcacttcagaaatcacttaatgtaatgttctttgaaattctgcatgtgtttattcacacagtaagcaccatgcctgtcaggatacaaaatagttcttttaccccaatgagctcgaagctcatctccataattgcacccaccagtaaccccggagacctacaggtcttttcttatcactgtgggtttgtcattataggaattattatgcaagtgaattctagcatggaaaggcttactttactcagcatattgtcaaacacgtcagcagtttctgttccttagattgctgagtagcatttccctgttaggatagacctcaaaatatttatccaagcattagaggaaggcagttgccgttttccatttgtatgagttatgaatagaactgctacaaatgttcacatacatatttttgtatgaaaactagtgggttttttgttttattttgttgctggtttgttacagacaatggtctcactgtagaatgataaaatgaagtatagtcgtccacaaggtttggaagagcacatgggagttgattacagtgcttacagagggggcacagggagattgtagggcaggaaggctgtaaaagttgtgggattgtaggtttctgattttcccccttttttctttctttttttcttcctttctttctttagtaaaccttatattggaggagtgttcttagtattttttattggatattttatttatttacatttcaaatgttatcccctttcccaattcccgctgaaaccctttgtctattgagactttaatgaccaaataaaaataaataaataaataaataaagatgtatattgtaatgttttgcatataagtatattgttaaaatcaggcaaattgatacatttgtcacaccatatagttacttcccccccccatgttttataactgttaagattcttcttgttaagtcttagcagatttcaactctaccatcgtgtgttattcacaatggagacccatctatacagtatgtctccatattttatttatcttgtaagagtaagttcaaattttttggccagttccaaactgtagcaattatattctggattttggaggatttctgcttttattaatctgaatagtatctccttaaattttatatgtgtgttgtgagataaatgccacacaattttatgtttgtctcttttatagccactaaatgttttcttaacttggatacttcaaatattggctatttctctttggaataataatatattcttgcgccattggctatatatatattctaaatgtatacatgcttaaaagtgggatttctgaaaaccatagcaattctgtatttaatttttcaagaaacctccatattctctcctgtaatggctgtatcaatttccattcctaccaatggtatctgtgtcttaaggatatccattcattcttatgtatgaagtcataccttgttgtggttttgatcaaattttcctagtaattatgaacaatccgttaataattttcaactataaatattaatgctataagagttcacgacaacatttgaaagtttattttggaaaaactgaaaggaatcagttcttcatacatatgtacatcatacatgctagtatgaattgattttcagattgtcttttacttgaaaactgaagtataactttttgagacaataaaaaacataacagagacaagggcacagattttagagacataacagtttttctaagacaagtcttatttagcactatcaagaaatctactaatgttatttttcagcgttttaactctgacctgaataggccccttattccacccataatttctatgagttcatcagacttgtttgtggattctctgctgctttgacttatgggtgtgttcaattatactttccctagttgagaaaatacaatgtttgatgttgaatataagggaattttataaaaatataagaggttgagtattataactgataaagtagataatttaacatttttgttctaagtaagagtaagaaaacctcttctttgatagtagaaaagaaagtctgcatctgctgtaagctacttgatttcctctcttagagaatattattagtgattctacaagctatttgacaaactcccataactagccataggggttttagtaataataataagaacaaataataaagcaatataaaaagagaatttcacaaattcaccttcatttttatgctgctattagtttaaggtatgaaatattaagatagactataaaattaaatttaaaaaacattcctctatgggaacactcttctgtaaactctggctttctttctctgcctttctgattctctctttgcattggacatactgtctaatgcctttgtagcataaagatttttctctttgatgatacttcagggacctgtggaactgcaaaaaaatctaaaacattctaagaaaataatagtttacaaaatataaaatttgctgcatcagttattatagaatatatgggtcatagggttcgtgatggtctttacttcctatttaacccaacagtgctagtcaaaagtacagtgctgggaaagtaagacaatcccatcaggtctctgggatgtgtgagtcttcagaggtcgaccagtactccagctttgatttttagatcctgagattagaaactcttaatctcagttgttaaccttgtgaacaaagaatggcttcatattgagtatttgcagtctacatgatgacaggcattgcctttggctttgacttagcaaagtagtctcttcatgctgcttatcagtaaccctgtattgccaaatgtactttttattgtatttcaaattttattaataaaacatgtagttttcactctggttatgtacatgcttgcagactgtaacatctctaattttgctttctgtatacaatgttgagaatatttattgtgttttctttgatagaacatatttaccaatccctgataaataaggaatttaaagcctggggaagctaaatagatcccattgattacccaagttcaggagtgcacctgttgttgttctgtttgctttgcaagtgagttagcttctcttttccttagcttcttaatctataatactgttatgaaaagtgagtgccttgcacatgattattgtttccataatggttacctgttgtcatacttagtgtcactgtgtttaactgatgggctgtcctaaagagaccaaaaatctcctattttttataattgggtacaagccatcatatttcatcacatgagagaaaattggcatttatttttattctcatttttgtatggtggtttgttcatccccttttaacttctctataaggtaatggaaagatattttatacttttacattacatttgtgattcctaatattgatgggaaatttttaaaacagtgcacttacaagacagcttccagaataaccagccctgaatctggcaggtgaaagtgaaacactgtgggtatttcatcctcttatccagaggaccatcacataagtatatatggccacttgagctgattacaatttttttaatgattaagatactaattttatggtatttcattcattaatgaaattttgtgtttctatctattttttcagtgttaactcacacaaagcacattttccaagattattgatatcttcttgtcaaactccaaaactgtcatgctgaactacatggaatctagtgaggcaagactctaaacactggatcctttggtacagtgatttgagagtcttttggcaactcattttttttttagtgcttggaaaaggcccacgccatttcatttctccctaagagttagaataaaggaaaacctattttctgctgtaataaaatacagaagtctagtttcccaaaaagatcaactgtgtggccgacaatttctaggaaaattattgtgaaaggccataagatagaacttgaattttcaaaagtgtcacagctaaaggaccatctctaaccttgacttactaaagtggcaagaattggtgttgccgataattacttcttgtgtgactccgctcttgtgtttgctcaatttactgggccaaacaagatcttactcttcttagacctgtagatttaatctcacaaaagaaaacactcctgtttttgtaaaacctgtttagcacatcatcttccctaacttactgttatttataataaaaacatatcttaacttaaaaagaaataggaggataggaaaagatgcggtgatgtttactttaaaagaaattaacaagatgtatttgtttttgttacatccagaattaaatatgtagtgtaaaaggcaaaatttgatagcagatagggtgagtgagacccatatgcaccagacaactctctaaataaacaagaacggatcaggagaaatctaaggtcaacatttgccactagcactttatttctgtataagtatagttctgctagacttttgtaacagttttaagaaaaaataggttacaattgtttgttctcataatatctagtatttcacttaacagaattcttatcaccgtggaattactaattagattgtatactttcttgggcacagagtcgattcagtcttgatcaccatagtatccagtgtattcagcacagttcagagtcttatactaaagaggtctcacatgagtttgaaagaatgaatgcataaatagatatacacaaatgaataaaattgtaaggggaattattattttatttattggactgagtgttattaaagggccatatgtatcaactaatagtaggcctttcaaatatatcaggagagggcatgcctttgatgtgtatgtcacccatccacagatcattctacttatctctgcatatcagccaattttcacattaagggtataatgctgttttcacagagataaagtatttgcatcaagaccttgctcagatattgccttctactaaaattaccttcattcccccagctatgagtaattgcttcttctctaatgatctcccacaacacattattgaggactctttggactaaatttgctttcagagttttcagtggtttatttagttgtatctttcccacactgcactttgttcctgtgctttgaaaaataccattcaagttaaatattggtgcactaaaacagaaaattgttgaaagaaaataataacacatatatttcaaattacacacacacacataaatatatatacatatatgtatgcataatacaggtatatgtatctacatatatctatctctttctatcactatctatctatcaatctagctagctagctaaatacttagagtacctatcccaaggtcaaagatgagaaatttttccacaatattatcatatacagtcagttcaattgcagctctgtttgcagttgaataggaatgactgtgagactcttagctactgttcttttgagcattgctgactagcatttccagtgtagccactgttattaattaactgattcaggtgttcatacaatgcattctcctgaacaatttattgaataataattaatgggataatttttgttcccaggtagatctcaggataacaggacaaaaggaccctgtagacaaattcttgcacagcagtgggtcagtggctaagatactgggtgggggcatatgagtgggcctttgctttctacagagtcagacccttcattgtcctctgtgaatattctctcatgttctctaaatgaaagttaatgcacatgctgccaagtgtcttatccttccttcttttcctctttgccttgttttgttttgaaatagttagtacacatagtgtaccccagtttggaatatgaacatgtcagtcttcatgcctcttagaagacatctccagttgctttaagccagaattgactaacatctgagcttaatcccatttggtgtttgattttttttttctagtttgtttttgttttcctctttctccatttcctcttcctcctcctccacttgttattctcctccttctcttctccttctgagacaatgacagtgtcctgctatatatagcccctgctgcccttgaactcagtctgttaactaggtggcccagtcctggagcttaattagagttgtgtgctaccgtgtgcagtttaaaatgataacaatctcagtcttaaacctataagcagccaatgagacctatttctcacatccattttttctttatactatgacagaatattagtataaattaatttgatggtacattaaaagacactttttcaaaagtcttttaaattagaaaaatttacttctgaaatagttaacagacttgtctgtattggtagtgacagctaacctttattgatttctgcatatgaggccctgctctgagagaattatgtgtgaaatcgcatcaactgtcttcacaaaaagtcttttggtggataaactgagggacagagaggaaaccctttgaaagatgtatttttattacatgtgtgtgttcatgcatctgcatgttggcatgtgcatgtggttgcctgagttgatcagaaacataagatgcccctgaagctggggtcacaagcagttgcaggtgcagggcaccaaactcaaacctctccaagagcagtaagcagtgtaaaccacagaccaactctccagtcctgatgcgggagaatgtccaaaattattaattaattaaaattaaaatatgacaacgtcaagatttagtcccttgaaatctgatccatagcttttaaacaatacacgtagtccttataccaagtctctaaactacaatttatatttatatgatttctccaaagcctttatgttttctctgtttttagagataaacttcattttcaagcagacttaaatgattaaataatcatcaacttgtttccctttacacatgttcaggaaatgagttcatatttaatataaacaaatggacaagtatattaaaaagacaggaagggaatggttgtttaagatgatatacacctgtctaagctacctgtgtgtttagactgttaatagttgtttgaaatagttgttacttgtccaggaagaacccggtgcagatgagagaatgtgtttctgcttagaaccctcgtctattcccccaccccagcattcttttggttaattctgttcttctcctttattctccatgtatagacattttacctcaatcaaaatcttaaagtaggctgtgtttacatgctcccatgctatctcttaatttgtaaaatgagggattgacttaactgatcataaatctctggggaaattttatcatctacatatttgaaggaatcccattttattaagaaaaagtgtatagtaatctgtaagcaaagcacatcaaaaccagccattgatgtgaacatttttatctagtaattaaattccacttgtatttttttacagacttttattttgaagtcactaagttgtttccaaaaaatgaaattaactctgttttttttaaatgtctaatgtatgtatattaaggtggaattatataaatctatctactttgaagatgtcagttcataatcaagaagtgtttattaaaaaatttaacaaagtaactgatcacccaaggctttgatgaattcatgtcttagaaacacaatagcttagatgtttaaaataacttcttattcatttacaggaaatccagattgtctttttcttctaaaatcttttgctgttcacttttaaatccccattcaacttagccccactccaagggcagcgaaattcaccttcctgtgttgactatgtataggtactttaggatcttaatttatgctaaaggacctaagcaactattgtattagaatcttaaaacttcttgtaggtttgaaaatgcttgtctcttcagcatccaatgctgcattttaagaatatctaactagaccaatcaggacagattctgggccttctgtgtcaactagttactcaaaacttcctgggtataatagagcttagcaaagtaaataaaggaagaacaatgtcttctgccctcaaggaagttggcatagggttatgatgatgaatagatgtattaacaagttccccctgcatattactcttaaaacctccatttatatttcattcccaaaataggtatggtatctgagtaatagtaaagtacacatagttttaaaagtgaatatggtcgtgagacatagtgagtgtaaagatggactttagtgcttagcacagcacaagtgggacttgaaacgcctctgaagtcctgacacttgaactgccttgggttgagctggtagtgacagacggaaaagaaaacacacaggaattcatcttagtcatgcttcctcaagggaaggtgcccagagagaaggaccagagcagtgtttactgccttgagacttctgctattgggaacaataatcatcagtcaattctttattaaaataaccgtttatgatttgttttaaagtataatggcaaatattatgtctaacacagtgttctctgttaataagaatagtaaataaacaacactcttccttgtgtccagtcatcagactgtttctccaactattggattttatctatttgttgcttttcaaactgtacaaaatacagtcagcatttcttaccgattttctccagtttttcttatttgttgaatgacttatagccttttaaacttgctagaacatgattcctttatttgccctagttgtctaggttcattgttttattgttcaaagattaacgatttggttgttgaaatgctctgtacctcaaaagaatcacgggaatttgggtgtcttcttattttttctttctttttttttccatttttcttttttgcttatatatgtagggtctttctatatatgtgtctatgactatctatcatctatctgtgtgtgtgcttgtgtatatgcttgtgtgttcataggtgtatgaatgcatatgtgtatgcagataagtatgcacttataccacctatgtgtgaagtctccagtgttgatagtaaatatcctcaatctctattaaccctatatttttgaaacaaactctttcactgagcatggagcataccattttggttagtttggctagccagatagccagggagtctgcctcctactcctgcatattggaattacatatcagccccttcagcaacccacctttactggcttctaggtatctgaatggatgataaaggggagcaggcattttcttttcttgctcagccatcttccctgtactggcttgagttttttgttgctgcaactgtaacagacttttaatcataatctagggtaagtgctatcctaagtggtatagttatacaactcattctgctgctgtgttttcttaacgagctttagtgttttaacacgtctacggatttctgaatttaggatataatgtcaagtaaaataagccaggcccagacagacaaatagagcatgttctcacccataagcgaaaacaaacacacaagcaaaaaaacaagagacacacaaacaaaaaacctgttgatttcacagaaggggaagagaaagggaggtaaaggcagatgaaataatgaatgctgaagtcgcacggagagaataattctctgttacatacaagagttcattatacagtttcataaagatctcaaagagaggatgcaatgcgtcctaaaacacatgtgcacaagttaaagtataggttcaagtattgactacccaggtttttcatgtcttctgtgtatgtattaacatttgtactgtattccaggaacagaaaaattaacgagtttcagatatgaattatgttatatcaaatattaaaaatagatttttttctttgatcagctaaaggaagttactagaagttcaggaagaggatctttgtttttatagaatagtattctcttatcaaatatagttgtatgtagctaaagagatggctcaccagaatgtgagaatgtgggctgttcttccagaggactgagttcaattccaagcactcacatggaggctcacatgtgagcctgtaacctgtaaccccagtcaagggcatctgatgccctctgctggcctccatggacacctggcatgcacacagtacacagacacacagtctagcaaagatccccatacacattaaagatgttttaaaaaatttactacgtgtaaaccttttcactaaagttcattatgttgacaattgaatctggagaaatgggtggccatgtcttacatacaaataaccagtttaagagaaaatatcaacgtgtcttacttcatgaaatactcagagtaaccttagaaagttgaatcctgctctcagccaatcatcagactgagcatggggaacccaatggaggagttaggggaagaactgaaggagctgaaggggtttgcaagctcataggaagaacaacaatatcaaccaaccagacgtcccacccccacccccagagctcccagggactaaaaccacgaaccaaagagaacacatggagggacttaggctccagctgcatatgtagtagaggatggccttgtcctgtgtaggcttgatgccccagagtagggttatgctagggcagtgagatggtagtgggggggtggggtaggcttgnnnnnnnnnnnnnnnnnnnnaaattgtaaataaataaaaacctgtgaaaaaagaaagaaagaaagccgaatccttttcattcgtggtcttggtagtcttgttaagtgccttttgttctcttgttgccttgctatcttacttctcaacctggggtaccttgattgctcttaagagctttggtacagcagcatggaatttagtctccagtgttggcaccctgatgtttgcagtgtattcagcctgagattcggatgacttagaaattctgattaacatggtttggaaacagttaccctgtgttcctttcctatggctactgtattacgctactaccttcatcataatatggcttatgtacttattctccaataattctgcagtctacaagtttaatgtcagcgccaaggtccaggtgagaccagtgataccgtccttctggaaaccataggagataatatttcctagttctgctgactgaaatattccttggttatgaccgcatcacccatgggacaatatctggtttcacggtcacactgacttgccctcttctatctataggcaacctccttctgttaagaatgcatgggatttatgtggttgcatttagtgcccatctagaaaattcaggaaaacatctccaaggaaaaaatcctcagtctcttattttttaaccatacaaaatggtatttatagatccaaggattaaggtttatgcattttggaatagaaatgttcaaatgttagcatcaaggtttacatgttttggaataagaatcttccaactacctcatcatctttgcctgtgcatccacccctaaccctaactagcctaactagcatctttcactgttcctgtaggtcaggtgaagagataggtgggaaaacctaatggggaaggggaggctgacaggaggggggggactgactttgatgtttgcaccttgttatttttaaaactgaaccagttaagcacagggcatgactttaagactttcagaattagataaagctagctccttgatcaatgctctgaagatttttttttcacatggttacttgaccctgattctcataattctcattttaatcatgaagatatctaaagagactcaaactcagttctgtgttcctcagtcttaaccttctttcattgctgctgaaggcgaggagaacacaatggctaagtcatagctgtcaggtctctgtcacactgcattcaggaaacctgggtgctgttacaactgtttttgagtatttattcttacgatacagaatgaggagggatactgcagaaaggtggctatggggaaaacatctggaagaaatcacatttccaggatcaaagggctccttgtgcagcccagagggtcctccgagtgctcctcagagcaaacaaacaattctctggatgagtcactgaattttttttttctgccaaaagcccacatgtgttgcaagagctcaaggaaaaggggtggagaaaggagagaaaatgaagttaaaggaggcacaaaaaatgactttaaaaacctatatatgaataagaaaaatcgtagcatgattataatcttttcatatatgtggcattctcaacattataccacttatattgccctagcctagagtaaaattatgtatagtcaaaatatattgaaaatcacaaaaagaaaatgtagcaaagggtggtggaggagactacaagactttgaaacaacatatctctagtgcatgaaaattggcaaccgagagtggcccacaccctagccagtggcattttactgaggaaagaaaagttacttatgaatcagtacagccatgctttgttctgcatgagtgttttaatagagcgagtgtaatataaggatcaggtgggctcatgggaatggaacaaaaggttttgtaaaattaaagcaaaataattatagctctaggtgcaaagcgagaatactccagcagttgatagcaaggacctgctcagagcgggaggggggcacactggaaggttttctttttttctttctttctttctttttttttttattcactaacaaaggcttttaataggtaacagttgtaaagcatctttgaaagtaattaatgcacccacacaaaaatttattaaaatgaaaatttaaggaattgtctaaaatgaattaattaacaaaaaaagaacatcatgcctttcttattttttaaagaaggagagaaggttaagcagagcagatttttgtgagattgcattttaaaatgttcttggtttatttagtatctgaatagcccttaaagagagagttggcgggctttgttatcctctccctttagaaacactaactgggacctggcatcaaatggcgattaatttgccccacatgagcttcaccgcccctcaaaatgatggcatctgtttacaaacagtccaaagtttaggaagtttgcagagacctgtagtaagccgaataggccatccagaggcacagatgggtttgtgctgttgctcacctggcctttccccagcctcctatgccaatactactctgcttcccgtggccctgtagaagctgagggcaaatatgtgaggtccagggttggtcagtcttaccagagacacttcctagccagcagggagagcattgactgccctgatcctatttccctgagaaccctggccagttgcacttgctctccaccctgcttcttttgcatttgttcccttctgagatacaattacaaaggaaagtatgtgcggcccacagaagcctttactctttgctgggaaaatgattcctagctgatttcaaaatcttccactttcagaatgttgctggtggctatacctcaaaaactttaggtctgaacttgagtgaatctctgaggataaggaatttcaaaccttccatgctgcaagtgcttggatacgacagcctttcttacaatagtgtcttattctattaatgcagtattctagtgttttccttgaaaaaagtatttctgaacgtcaattcagggaaaatatcatatgtaaggaagggtggtgtgaagacagccttcatgagataacatgactattacacaggcttcataatgataatagcacactgtgtttactatgattacgtatgatgtgcagatatttaatagaattacctttcccttcagcaggttttaaatgtctcttatcaagcctttgttaatattgggctgtcaacagattatgtttattttttttcgagacattgaatttagtgcttatgactaatagagcaaggcactgaaagtgtctttgcttatgaaaaaaaacaggcaaaattataaagtccaggtaaaggacactgaacctcatggtctgtccataagcctagtcgaactccattttctctggaatatgatttaaaaacaagtgaaataaaaaaaatggtatggggctagatagattgctcaactcattagatctgtggctactcttgcagaagaacacagttcgattcccggcacccacatggcagctcagactgtctataaaaacagttttaaggggtttgatcccttctgacgtgccagactgtggcatggtgaacaaacacaagcagaaaaagacacataaaatagaaaaatgtacaaataaatacctatatatttttctgttgttgccaagaggaattatgatcaacttagcagcttacaacactctattatttcactgttctccaggagtttagcttggctttcaccagtttctttgttgtaggtttcataaggttgtaataaaggcctgatctggttatgttcctagcaggatttaaggaagaccctgcttctgaactgatactgttccctgtaactctgagatgaaacacctcctttccttaatgatgacttgtcaaggtcatccttggctctttgaatgttgtctttatatatcagggccaacaatagtgtctcaaataccatgagattgctcggacttcccttctcccatttatagaatagaaatttagaatcgctacattccaaacctaaaaattgtctgcttctaggttgacttgattgaacccacttgaaacgtctagaatattctcaccgatgggatgtccatatgcataaccacacttgcataatttcctcagccatatactgtaagagtatcatgcgttataggttcttggtattaatttaagagaattgcattttgatgtataattattttcattctcacagataattctgtatgaatgctccatttctaatgtatttctaaacaattctgagctttgggggtaggattgtttctagaagtaaatcggtttacataaactactaggatttttttcctaatatagtttatagcacttggtaaaagtgatttttcaacttgactaataaggtcaagtagaaatataggcaaaataaataaggcaaggaactggagctgacatccacctatgtctgacagcattgctcaaggttgactctgtttgggatgcagggtttctttggatattaagaacagcatagaggcaaacatcttggattggggtttctcttccactgttgtcttaactaagaactaagttggcccagtaacttagcaacttatagactttcaaataagactgcatgtccagagattagaaaaataacagaaaaaattctagcaaacaggatttcccaagtaaaaaatgggaatgattagcatagatatactgtaaatcttcaatgctaactacaaattttagcctaattacaaataaaatacgatgtttattaatgtttcaaatgtcagaacctggttttaatttaataaatcttacttacataatcaattatcagctaaaagcaagaataattgaagggagatatgtatttatatttttccgaaaacatattcagttgtgctgttcatgtgtttatgatagtttaatatataattgtttttccaatattcctaattgcataattaataataaaatacaaacttaactaagtattattgcttctctaagaggatgaggaaagccacactagcaccatatgtagatacattcatagaatgcatgcaaatacacagaatatatacataaagtacatttaggtgtatttattttatctatttcacttcttaaatagtgaatatactttgtcttactgtgtgtcaaatacagaatactctagggaacaaattttatgactataagatgacatgaggacacataatatcctcctttgtatttctatattaaggcagtattgatgtcaaaacaagctgtatgtaatggaccagagagagtagtaggtgattacatcagaattaaatttcccctttcctcctttgaatgttagagatataacattaagaatgtcagttcatcacttctgcctcagtttccatgcctataaaacaagaaggatatttttcctgtttaaattttagggttgttccagtaaaataagctagttaacttaaggtacttaaattaaaattttctatgaaagacattttaatgttttaaacaaatattcatgacttgtctcatatttaaggaatggtctgtgtcatgaaatacatgaaatcaactgaaaatggaaacagatttcttactctatttttgtgtcagttgtagtgttcatgttgtttcttgaatgtctgctaagttactggttacagaactaagaaattaagaaataaaactattcagtaaaaaataaaattaatatttagttgattttaatgttgttattttgctaaaggtaattaggacagtgttggctatttggtgaattgactaacagggaggaatttagaattaatgattaaaacatagaattgctgtaatatacttgcttgataattttctctattttgttaatcacttcattagtaaacttatagcttacttagttctaaatctcagcaacaatatattaagaaacacgggagcttactagttaaattgtattcccagttgcagttgtgtgtgtgcatgtgagttggctagttgttttaatgtcccatttccatgtctctagttctgttttctcatccatctattttggtttgatatttttaagatatagtttctttaagctaatggatgattggttattggggtgagttttaaggtttgttgagtgccttaaacacatatgtacatgtgtgtttacataatatctttgtatgtaaatgtatgtgtggtgtgcctctctgtgtgtgtgtgtgtttgctctatctgaatttgtaatttgcttcctcttatcccttcctcagagatgaggttcatcattatttattcctgaaggagccataggctcatacaactactgggctttgtaccttaaaggcctgggtaagagcttcctttgaaggtaactctacttctagccctttctaactattgtcttagaacccaggcatctataacagagaagagaaggatgacaagaaagctttcctccatttctgctgggctgcccctttctctccctttcttcacttcctccttccttcttgtctccccctttccttttccccattcttccactccctttctccctcctttccatccttccttcaaccttcttttctttaatctttcatttctttttctttttcttggtttttcttttgcttttgacccccttaagccagtttgcacgttatttatttttttaaatgagagccaacttttctctgaaagctaggctagcattttcctcatgcttcttatttccctactcgttgattctaattccactttctctgcacttcaccttgaagcttttctgtgtcctaagagtacagctgttctgaagacatcatttctgtgtcaggaattatggaggaatgcatgaggaatatgctagctctatgtcgctcctgctccttgtcaacagctgactcctactgaacatcagctagacagcatcttctcagtggagaaaataaagaatgtaattgatttatgaattgtttattatattaacagattaaatagaggtggaattattttattcagtataattaatctcctttgaagacatagacattaccaaagccaacttctatggagacacagggtaagctcagattacaggtttgaatttggtttttacggtaaaaaggaactataatgctacatccttttttttttctacatccaactgcatttctgtattacagcaattttttagcaaaaataagtttagaaagaaagaaaggagtgattgtattattacagatgtctgttgacaactgaaaatgttgctaagcagagttttcttggaggattcaaattttccagttggactgatttactgtcaaaagtcaagttgattattcttctctgaattaatttgataattggctgaataaaatgttaatgttttttagaaaaggtagaattctaaaactaggtaaaaaaatattttctaagacacttgctatttttgtggatttttttttccttaaacactctggtgaacccttcatgtagttataacttcctttttcatgatgtatttctttcttgacctacttgctatatgtgcataacttaaatacacacatatacactacatatacagacatgtacaccacacacacacacacacagagagagagagagagagagggagagagagagacagagagagagagagagagagggagagggagagggagagggagagaggagaaaaggagaaaatacattgagaaaaacaacaaacaagagaaaaacaacaacaacaaaaccaaaaaaaaaaaaaccaaacaaataaaaaggaaaataccaatgacaaagaagttagaaagatctaataagagaatgtatctcttctaaaagtggtgttttaattcagtggtggaataggaattccacccatgaataccagagtgtatcttatcccttgagccttagagctggacttgcaggcagttagctgccctgtttgagagaagagaaacaaatgctggtcctcaggaaaaacagcaagtgcacttatccattaagccttctctgtagttccttgaagaccatttccccccatgatactagggacttgaaccctgggcctcatgcactttaagctagagttgtaccactaagcaatatgccccacctctacaagacttctttggagttttctaagcccagttcagggttcagggctttgccttattctcaatactagcatgattcttgcatgcacttacctgtggtctccactcctaccttctcatccccgtttaggcctcattcctttcttgtccccaggtgtcttcacacttagaacctcttacacttaagcttctaggcggttgcatttgactatgatctagtcttggatcccacttattgctagttctatatgccatgattctcttgtaatgtagcttctcctctcagtaatgctgttaggtagcacatccccattaagatgcacatactaaatatatggtgggagctccatgctcaccttcctaccttccctccagtaaacgattctaagaagtttaagactcttgatgttttctgtggactgtatagaactttgttttaaaatcaatgttctatagagtttctgaaaactacaaaaaaaagacctctatgtactatgtaataaatcgtctattgctatgaagagacatctcttttaaaggaaaacatttattggggctggcttacagtttcagaggtttagttctctatcgtcatggtgggacacatgtcaacatgcaggcagacatggttctaaaaaagccaagatttccacatattgatccgaaggcagcagaataagactggaatgccacactgagcaaaccttgagcatagttctgtccccacagtgacacaattcctcgaactatgccacatctactccaacgaagcactaatactaatagtaccacttttcagggtctaagcattcaaacacaggagtctgtggtggccaaacctattcaaaccactattcatacttaggcagatttcttcagtggatattatacctttgaaccttgtttgaattttatttagtctttaaggctggttatagggactctttcaatctctgccttcagcttatgtgacatacttcctatgactatctatagctgcgttcaaatttctcttttctataaggtgtggcaggatttgtcatattgatttacaaggtcatcttattccagtatcacttaatcttaactaattatgactggattttcaaataaggtcaattttttaattaattaattaattttatgtatgtgagtacactgttggtctctcttcatgcataccagaagagggcactgaatcccattacagatggttgtgagccaccatgtggttgctgggaattgaactcacgacctctggaagagcagtcagtgctcttaaccactgaaccatctctctagccccaaggccaaattctgaataccaaagataatggacttaagtatatccattttagaactccataatttcacccataataaccacaaataatatttctatcatattcctaccacagtgattctgtaaagatgaattatgaacgtatttacaagttgctcatagttagtctaagatactttctccttccctcactttctcgactcttcttcattcagagatgcagaaaagtatttttttaactgctagcattgtgctttcttctgaaaatattccacttcttatctaacgtgaagagggggatccagagtaccggttagttgtacattaaggaaggatggatggttccaaggaaagagctcctggcaagtaaaggtccaggttgggatgccatgcacgttgtgtcttttgcttcactcacttaagggactatgcttccttttggggtcttagaagatgttgagataggcctatagttaatattgtaacattagagaattgacataagatgtgaagttacaactagactaaaaaatatctaaaataaaatgttggaaattgactgccttactgagttcttgcctttgaagttacccattaatataggaaaaaccctcctcagaattgaggaaggtatgaaatcagagtggatggtgaatcaagtttttgtctgcagtatctagcatacttaggttattcaataaataaaataaattaagatcaaaggctgtgagtgggtgaggaaatgtggacttttagtcgtaacaggttgttcttctgagccagattcagggcctggagctgcaggtgctagtctaccagggtggcctgtgtgcatctcagggcaccacgctgatgagcctcccactgcacttctgattttggcagccacagcggaatcagctctttgatccttggagtggctcctgccacagtaagtggctctgtttgttttgtccttccttttggtcattactcccacctggcagtataggacaaaaaataggagtgggagggagtcgtgaggcacactcaggaatatggtctgccaagcatgaaaagctacttgcactgttctgtttctaagagagcatggataatcttactgccaactcattaatgaatacaggttttttgtatatcatacaaaacagactactaaaaagcacatcttttcattctgcattctcttcactgtggtcttagatccaccatcaaatgcatccagctccacaaatgaaagatattactactcctcttctcttcatagtcttcttgcataagtatttggatatacttgcaaacatctacttcatcttatgctttggtactttaaaaatgtattctctaacatatttgaaaatcaacttggatgccatatttgcataaaatatttcatttcattatatattttatttacaaataattctatcaatttatcaattacattacactattctggtctatgtatacattgtgaaaatataagctgttaatatgtatttaatatttaacatattcatcaattttcctgcaggacactttgtttactgtttcaatagattttgtagtagtctcagtttacttcaatacatcatttgaaaacgaacataaaaatgattatacctattttatactgaggtgttgaatgagtgagttaaagtttcacgaggcaatacaattaccattcttactaattcttcattctgacactctggaatttaacatatttagtttaacatttcttttaaggtggtcaaatcacataatacatatccttatatcgtatggaactcacagatgaagtcagaaaaggagaaataagagaatgctaaatggcttatggcaaatattgtagaaaatgtacagtgaagataggatttcattggtctggcttgggcctctttcatatgtgatctatctataattagttttctagcaagtaatgtgtcctactttatataatcctgattttcacatgtatacatttgtgtacatttttagccctcaactatcaactaattatattcctaaatttaattgattagttaattcaaagatgcttgtccaggtgtggatctaactgtgggactgggtggctttgttccctttattagctagttaactgtttctaggcagcagttgtttgtatacatgagtaaaatatatgactttagaagttataaagtatatggaatttatttaggagaaatcatgcaaatgtttaaatgcctacaatctttgtgagtgttgtttccagccagacactgatatttctttacaaaaatctagagattcagatagttggtcagagttgagacttaaggctaaacttcactgacttgttcttacaaatccagacatcatagagaaagaatacatgacaagcctgtactttgtccaaaatacaaattataataaaaaaataagcattttctagaaaattctaaaattctgggagccctgcttaggtagaaagtagaatataggttgatatttaggcatcctctgctttcctgctacacacctgatctcatccagaaactgtaaaattaggaacattagtgaagagtctagacagtctctacttaaagctaaaaacaaaacaaaacaaaaccaacccacaaaaactacttgacttacacaagaatattgacaagagccttcctaaagctcttcattgatcactctccacctctataggaatatatacatttggcctgaaattagttttataaccataactgaacatgttattattaaatattgtgttcatcaatagttgttccacagtttaggtcaagtattgatggttctactgggcccactagtgtctaaacagaagccgtgtggagaaagcatctgcttgcccagggatggtggaatcctaacactggcatgcatggaggagatagtgattagactgaggggtggcttcttcatgtagtcccaaccaagctgttcagtcttcttagccagggtgtcatggtgcatgtaggaagcagcaacaggtctacagagtgagttccaaagagcaattgcaacacaggaatcctgccttgaaaacaccttaaataaataaacaaacaaacagataaatgaatcaataagtaaatgttaatatgttaatttattgtaaaaataagaatttactataaacctgtattcctgtgtctattttttgtctggtaggtgtttccttataataacaacttcagccatattataaacatcttcgaaagaaaacttccaaggtaccaaatccaatttattttaactaacttatttatatttattgtttaagcaagatttaataatgccatgcatcttttgatctaatagtaaatcttgattgcatgtgttggtctctgaatagttaaaacatcatatgatatgtatttctcaatgatttcagtgctatctgtcttaagtgtatttattttagtccttaataacaaactgctttactagtaagggcactgagtatcagagaagagaaataatttgacactgtgtatacagctagaactcaggcttaggcctttgtgaagcagtctcccttctctctttttaaactaccatcttttctgtgtctcaagattctctctgcattgcttcctaaaagtgtgtgtaatgtagtttgaataaggacaaagaggaattgtgttgcctatttttgtttgtttgcttgtctgcttgcttgctttaaacacttgaaaccatgtccaacacaatgtacctgtctttttttttttttctgttaatgcagcctgctagcctggagattccatagtattatatcccagttttatttgtagggctacctttacattcactattaaatccaaaactatctaaatttcctagattattaaaatattgtaattgctatatgttacatgcaactataatttaataagattttggtagatatttgttacaggggtcttaatatttaggattttagtgtacatccagtttactatttgtggagtttcatcatctgttaaataaaaattgaaataggacctacctcagttcttctggtgattaaatgagatacttttctgaatatatgcttatataaaattgtacatcagttaccaacatataggaagtactcaatagtcttaattgttattatatataagtgttacatgaatagatagtacaagcttgataaatatttagtaaatggataaatgaacgatacaaattctttaactggcaatgtatgaccagtttgtaagtttggtattctaggtgcttctttacattctgaaaatgatataaaacaatgttcaatagaattgagaatgtcatccagtttccaagaggatttacaagctctagatgccacgttaggatagaccgttccccaccccacccccttatcatttgcaatcatttgtaatacatagcatgtgatctctgactagaatgtatctgtgaccactaagtaaatacatagtttcccttcttataatagccatgcaaatatgatttatcttctgacacaatacaaacagagtatgcatgtatgcatttggtgaacaaaagacaaatgagtaggaaaacaggatgtgtgcctacatcctctacttgcctgagataacaggaatgcattgatagagagaaggacagtgcacactcttatttgtgcctgtgttggggatataccaatattgttgcaatataccatcctgatgatggcagtcatcatggtttgagaaggactttgttccttaatagatttgtttttaaatcctgagctgtttactatctaaagcatttatctgaaattactattcactaaatccctcagttcctagaactgttaatctgattctagtaatagttttttttaaaaaagttcaaaggtttgcctgcctgtagaatgttcttccctaccactgacactgcaattctacctttagatgcagttaatgtgtcatgtctaagagctctgtttcatgctttcttgtatgtttgtgctacattgacagttttctgtttagaggtgcatgttttcttttaagctgtagtgattaaattataagcttcttgaaggcaaagcctgtcccttattctctcagtactggtattatccagtttctgatacagaagagattgtcaataaatatgtatctaacaaattaatgagtttgccttcacacacatcagataaggggcatgactataatctcctctgtgtttttgtttttctccaggatttgtgagccttttgaaattaactatggacatagtgctatgcttctgacttgtctagttgctttgagggatatttcttattgttgaaatggttttttttttttttgttagcaattggctgttttagtgttttgttttgtgttgtccgaccttgtttacactgtgtgtatgttttagagcagggctacccgtgtgctgttcatgagtgacgccgtgatggagccacatggaacagtgttcctaattctcacttctctttacatgctacctgctttggtgccttgttcaagcactgttattgatgtgctttgaaaagatgtgtggattgtgtcagcaagctgggaaagtcagagttttgttttgttttgttttgtttttcagccaaaattcttaggccttaataaaatatgcgatgcatagcttagaagtcaataactgtgccctacctgaacaaacgctccattgttacttgactgttttgaggtcggtccaggcctgaggattttgttaaaggctaacagaaatgtccagtatcacccagcctagcaagagaaaatctgacactcgcgacttgtacttctgtgttccaggctgttacacaaactcactgagtactgtatatgtctgatttctcaacttcacctgcagtaaacttgtgcaatcccggggctagagacctcctttgtaaatgttgtctgtccagtaatggtgttggcactgggaggccctagcagataaaagtggaagaacatatggcttccatctgaatacaaattggtggacatagtgtggtaattcagctgcgatggcctctatactgtaatctgaaagagtctgagtagatgtgaatttctcccactcctctacacccccattccactgtgttttgatcgccctgaagtacagccatcctgcgtcgccttctgactgtgttatttgtgaaatggccagcatgaggaattattaattaaagctaacaaatcaccctgacgagctgtgccctggcatggctgaaggttgattggcgaaagtgttctcctttagagaaaagactttttgtgctcgtgacgcagtcagggacggattattgaatatgcaagttagaagaaaaatcacaggacaagcaaattgagtatttactggcaaataattgcgctcttaaactgtggctctcttcctaaattcttaacattcccgagggttagaaagaaacacagaaaaatgcatcggtacagagttcatttcaaaaaaccacccatagactgatgtttgaggcttgtgcaggtaagtgtgattgtgtatgcctgggaagtgaaagaccaagcagaggatggggagtgtttctgtgagtctgctgagttgtttatacagctcagcatagttctaagttgagaatttagtttccgtgctgcatttattgtgaaagtgagagtcgtgaaaaggaaagggtgttttctcaagttatttgtctttatcagcaaaagaaaaagttaacgttttgtcctaaaaatagttttcattttgctcagatatttgtgactatgtataaaacgatgactggatttaaagatctgttgttattttcaacactgttaattatgatgcgtcttaacagtgtcccaaacacatgtggggaaactgttgcatggatttttaaaagtaaacactgttttacattaggacctagatagttagtccgtgttgagatttctacaggaacacgaacgtttggaagttgttgttaggcttctagctcttatagtaaccaaaatgtgtgtgtgtgtgtgtgtgtgtgtgtgtgtgtgtgtgtgtttcatctggaatgttgctcagactcctcacttttgaggtcattgtaagatataagaaacaactttaatgtctttttcaaaactaaatgaaaggcgtggaaatataaaaggagttgaaggctcatgtataaaatgtagatattaaacagatatacttttttataagtgcagttagattatgtgaaaagcatccagaaataatgtgtatgtactggccatgtattaaatgttctttgaaaacttagaaaaggtgctgtcatcaacaacaagctgtttttgagatgagaataattggctggcgaaatagcattttaggcttataataactatgagtagcatggatttaaaacaaaagcataaatgtaatttagaccaaattaactaattaataattgtaaagtgctttaagaataaaatatcgacatgataggaataggagtaggaataataaaaatggaaaatccagcaggtacacagaaattaaatcacagtcaactgcattcgctttcagaaactcaccattttaaaatataaataaataaaacaatttttttctgccttctaatccattccttgaactagaaaatatgttactagttaggtgactttccttactgtattctatgttacttcaatattagtttgtttcaatatgtagaatagagctcaaagaaagtttagaaaatatactttgtttaagattgacttccccctcgaccagatttcctcagatttcatgaggcagcctctttaaagttttcggtgagtattagaggctaaagttggtccattattttgaaatagcaaagagggcacttaaagcatatgttcagagaacaaaccatctgccttctttattatgagtatcacagcattatgaggaattggaaaggcttgaaaaattgagccaaagtcctgcagaagatcttaatactcagcacgctggattatagaatagcttagcatggccacactttttgtcttttaagaaaatactattactacctctgatacatgggcagtaacagcaaagtattgtagaatgacatgaactcatgacaaggtattggtgatctgcttttggttgagttttaagcttgttgttggagaaactcacagtgacttagagaaatagaaggtggtgactgttggaacaagaacgtagtccagctgctcacctctggagttgcagaaggcatgcagagaccagactcaagcactgctgtaatccctgtgatgtgggaggagtgtgggtcagctttattgccgtgggagaagtggattgcagcattagaatacagaagtaactataagctgatagaattcctagatggtactactctatcttcttagcatctggaatgatttgaaattttaaaaataataaatgaacaaaaaagtccttcctatttagctccaaatataataacactgtaattctaccctgagctttctataggggtcatataaggacaggccaagataattatcactatatataggatatctaatctgcaaacagagcactaaattgtactaactctgaccagcctggaaagctcattatcaagggaaaaattaggttatcttctaagttctcagtggttttcagaatcgtgcacttagatgggttgattaggccaaagacttcttttgtctgaaaactaaacctaaattcttttaaaaagctacagttgatatttataacaacaaaattattgactgggtaaggaaaatgactgcccagttcctatagatcatttactggtagaattttattttatacatatacagagtacagaattacagatgaatgtgcctggtgaatttctcatctagtagtctacagcttctgagaaatctgttattttgaggaagttaattttaatttgagcctttggatattcatgatcatactcaaatgtatatgcatgtatatgtacacattttaattttgctatttttgctattttgtatcaattaaggaaattacaaacagacaagaaatttgagtatgtaatactgatgataaaaagggaaaatgatgaactaggacaggtgtgatggtggtatcaggcatgaggtcagtagggacactgcttgctgtaggaccatacaatttcaactttcttacaattacatgaaaatgtgacaagttataccctccacagcatctgcaaaataaaagaccttgtctcatccatctctacatttgctttagatgatggactcccaatttagagaaggaacttccactgagaactatgggttatagtgtccaaaaaatcagcttggaagtatatacaatgcgtcttaacatgcagatatgttagtaatgatttctttctggaaaagaagaaatagaggagtgggagaagggggcagatggagaaggtaggaagagagggggaagaccaaggagctgggcttggggagagggcacgtgagtgttgtcaggttgataagaccaacttcttcttatggaaaatatgaagttaaggggaaagagacctccaagctatttaatatacatgtatgctatatattgttaccacaagtcaaacatttagactccttttgtcacagccactaaaacacattttatccaataaagctcttgaatcaacatcactgtccggagttgtgcctgaagcactaccctgtgcctgccctctctttctacttttgctttaagtagattgtcggtctttttacaggtttaaaagagcccttcatggcttaaaatttagcatatttcacctttgccttctgtcgtccttcaaaagttttaagagactgtctcgtcttctcacagtcaattttgatagataagttacatttgctaggttagttttctcttctctttcaatggatgacacaggaagctgagcaggaaccgaccaactgtaggaggaacactaaggcatgtcttagaaatttagaatttctgaatcaaaagctgtgaaggtggcacctggggatctacagtgtggacagctatctaggttagtcatgcatattagagtttaaaaacaagtgttttaaaactgtgacctttaactttatagtatgtgaaccacagctggtgagcgttcattataataacatgaactaaacactaatgcatatgcaatactgagtgatgtgtcttctactagagaaaatataattcagaatatcattgacatgtttcagggctttaaaccacatatcaccatctgacaaaatttaaaatatgttttgttattgatggaactttaatacaccaagtcatatcctgggtctgactagtaaaagatggtctgttttttgtgtgatacaattcacaagttggataatttgttattaggatactatcttctccatattcagatgagcatgaatttatgtgtaaacttatcttgagatcaggtggtaacacaagattctacattgtattatatctgtataggtaaacattgggaataatttcatatagtagtaccctgatactatttaggaggtgttaagaaacctctgcaaagccctccattttcctttgtggaagactgtactaacactgggtctggaggaagtgtcacactgacctcctaaatacattcctcccacattaaccagcaatattttttaaaagaatccttccatagagagggggaggagggaagtggagaggagagcggaggggagggggannnnnnnnnnnnnnnnnnnnnnnnnnnnnnnnnnnnnnnnnnnnnnnnnnnnnnnnnngagaggagaggagaggagaggagaggagaggagaggaggggaagagaattacaacctccatgcctctttccctctctgatgtctaagctggtctgcaagagttcttgaagtctcaacagacttgctagctgatggccaagcctgcataaggaggatctctgactgtgcttactcagagttcatggttccacaagttctaactatgaatacagcagtctcctgagcaaatcctgtaatgggcgtcataacctccacctagagcacatattagagccatgctccttgaggcaactcttgacacatttctatttgaataattttgaccaagttagtgagcatctgttttctcagtgtacctctaggataaatcggattattaacaatagttactttgagcatcatcttaaaaaatgaatatagcagataatgaagaggctcagcaaataatggcacttgccaccaagcctgacaacttgagttccatctccagaacctacattgtgaaggtagagaaccactccagcaaggtgttctttgacctctgcgtaacagtcagtgtacatacaaaattattaaatcattacttttaaaaaaataaaggcactttaacgattaaagccacatgcctcatgtctgaagacctcagtcggattctcagagcccatatgggggaaggagaaaatgcgcaggatggaactcatagctcctgaatgttgtcctctgacctccaacctgtgatgtggcagacacagccacacacgcacacactgcgcacataaataatgaataaatacatattaactttttgaagagtataagcatagaaaatgctaatcacactacatggcacttaaagaaaattagtcaagaaataatatcattacttctgtgattactatagtagcaaaagttgaatgtcaaaatgctacaggggatgtagctacaaaatgctacaggggatgtagcacataaagggatttaccaagcagtcggctcagaaacagagcaagagctccctatttcattggtgtctcatgatttcctggaagttttgaggtaaccttccttattatttccaggacaacataagaaatattgtgtgaattttaccttcctcccatctcccactgacctgtttccttcttttaatgtatatttactgagaatttcttgctaccatgacctttcttagaaactacagataatagcaaataaaataaaatgttgaccttaaaagggtttctattatattggactaggaagggataaaaatgaccaaacgaattagaaaggaatatatgtataaaacgaaggtgctttattggatcatgacccctgttccctgttacttctattgtgtcataatgtgggatgtgattttttttcctcctctggtgcatatacaaaatacacctgtggagattccttgaaggaaacttatccacaggaaatctacgtcttttaagggagtcaacaattgctttgagctttttttttctgagaacatatgtttaggttctttaattgaaccaagttaggggctcaggacgcatagcattcaagataaacaaggacaagtcaatctttctgggtcttaagacaccttagagaagactgatgactaacaatactgtgtgactttggtactgttgttgggaaagagagtaaaaggcaggatcctaggagattggagaacagaacaaattttaactgatactaaaagcctaataatagtagtacaaaatgaaagaaatttatgatgtaaagttctaagttttcctttgttcagtaagtggcatgtgcctgtaatgaaagtattttaaacagaaggacaatatattgaagaaacaaacaaaaaagggaaaatcacctgctaattcaccacttacagcctcttacagatgccatttttaacgttcattaggcacttttttttaaaactttacttttatgtgtaagattgtttttgcctgcctgtgtgtatgtgtactgagttcatttctgatacagaagagggctcaggtccctggaactggagtttaataaggtggttgtgcactgccatgtgggtactaggaaatgatcaccagaattgagttccttgcaaaaccagtaagagctcttaagccaagccatggctcagcctcactccgggcactttttaaagcacgtgttatgttctaaggtttagctagctagtcacaccttctcagaagggagtgttttaattggcaggtagtataagtagcagcatctcagactttgactcgttagctgtcttcaagtttgagctttcagactatatgggtcccaagcccagtagtatgactctgtcagcccagagatggcattaataaaaagcataagctccctctaaaacacagaagcatggcagactttcgggggccaaacctcactctgacttccttgctggcaatcatcttggacaaggtattggacttttgtgccgtaagtatcctgttctgtaaaatcagattattaacacttcataccccttatagcattctgagaaatgagtaaggtaatgcatttgaactattaattgtaattcaccaaaggccatcactactgttgttgctgttaggattatcgcttttataccattactcacaagcttgctgaaaatatatctttccagtgtaactgaattagccctactgacaaaataattcaaggcacacttctttctgaacttaaatcagagatatcatctttgcaacatttattgagacaatctaggtatagtataaaaatgtagtatgatttagcttaatatgaagatgatattatatgaaccaaatttatgggtttttgtagaaattatgtttaaatattcattaagtgctgtttattttttagtttgggacttaagttattaattttgggggttttttttctcttttttctgagacagggtttctctgtatagccctgcctgtcctggaactcactttgtagaccaggctggcctcgaactcagaaatccacctgcctctgcctcccgagtgctgggattaaaggtgtgcaccaccatgcctggctgggacttaagttattaaacggaactttatagtctgaagccccagtgattatgaattggtaaaactttctttaaacatcagttatggaaaagaaaaatacaattttgcctaaaagtaacatctttcagtggactttataattaatcaaatctttccttaagcatgagagttaacaaagatctctaacctacttagggctatacagtcggtgcttgagaatgtttatcaaatggattctcaacatgggattaggaaaggatgaagaaacagctcagatgctctgtgagtgatacagtgaagttcatatattttcttaccaaagcagttggcagtgcattgctaactttttatttatttttatcttacttacgttttagtggcactggggattgaacctgtgctgcacacaggataggcaggtactgtttttgaactgtatatccagccctgtgttaacttttagaatgtgtactcttgcttcagtcttaaaagctgaactatatcacaaagacaccgtaggcagtgttcttacatagagtgtgcttaatttatagtcaccacctctactatgtaggaagtatgtgatcatagactccttggtttttctttgtcttaaatcctcagatggaaaaagtggaccaataacatcccattggtctgtatttatggtgtctattagatatcttgatatatattggtacataatggatactcaataaatggtacccgctaccagcgataataaccacaacagtaataagacaaaagagcctcttagacaataatcataagctcattaatatctattaatatgtaacatgcattaatatatgagtatgtaaattataacagttgaaattgttttgcctaatatttgacacacaggaaatctagatgtaaatttgatatatttaaatgctctcatggaaaaggtgctataattattttagttaaatgaaaatacagttcaaaactccaaagctaacacagtcttatgaaaatgataataagaacaacagcctcccaatgatagggtttttttttttctgaaatgaccaaataatttgggcttaatgcaaataaataatatgtgcaaatgttttacttgaagtgatagaaaagagaaatatgtggaaaagtgatgacccctgatctgaataatattaattggaggcattttaaagatcaagaggctattattgctagctgcagtagatacatatggaaaatggctgcagagattcacaacttaaaaatagttcattgctaaattggaaactctgtgaatgtcacaaacagtgggctgtgaaacacgaatgaattgtggtgacagttgagtaccaagctgactatttttccccctcagagctgtccgtatttggctttatattttcctcatcctgatttaacccatcaatatttgtgcttttctaactagcactaacgtgcaacacatacattaaggatttcgttctaacccgctttgtttcctactttgttaccacggatgtctactgtcctgtagtattgctgattcctcgctttacagtccaggtttggagcagtgtcttgcaggcctctgtatttactctattcctccttttttccagctatctaaggactttcagccctttctgatctgcaagctgtttgtttagagcatatttcttctcggtgtagctttgattttgagcatttattgttaacctaagaatctgcattcactgtttatgacaggtctttctccccagtttttctgaaagatctctcttactctttatggcagggtcgctatgatgctggcttttgtgaacaagacttactttctgaacccaatagagcccccttcaaatgcagcagctccacactagcatgcgctagtctgacctttgggaaatgtcattagaaaactctgtgaagagtactttaaaatgcccaaattattgaggcttaatggcttttgtaacatggataccagccctacctcatagaggaacaggcctagaaatatatttttatgtggattttactgtgtgtggcgatttggccaccatttattgagtgacctctcttttctaaccattttaatcttaaaacaatcctctgtgatacttaccattctctttacttaataaatgagaaaactttaaccttaacttcttaaatgatggaactcaaggttctaatatgctaaagtttgtgctctgaattgagcacatgcgtgactttaggacagcaaagtaaaaatcatcaacttttatgtactatttttattccttcaaattgaaagaaaatggatgtttttttaaactgaacattcagtaaaaactgaacattgaaaagaatgttcaaaaggtaagaaaactaccgagcccagttcccacctccaaaaattgttttaaaaatagattaatattggtatattttataagcttcagtatgtctcagtacattatttaccttttctcttaatcccagtgtcttccacttgctatcttctgttaacatattgagtacttatagagtattagtatgatgtgaatcagcttttgccgttcaagagtctactattgacctcctaacaagctatttatacctcagctttttatacatgtaaatattataaaagtattgagacacattcattaatagtgttaataaaaatatagtggaaaatgctacatatgtatgctgctccttgttactgctccctccccccaaaaaaaatgttgacatgagataatattcaggtaaaaacagaacattattttaagtttttgcatctgtgtgcacttgtgttcacacttgtaaaaaatttagtagagttacatgttttggacattgattcagtattttgaacattgattcaatagagatataattgaaatcataatagttttttttttttggtgtttttgagacagggtttctctgtgtagccctgactgtcctggtactcactttgtagaccaggctggcctcgaactcagaaatccacctgcctctgcctcccaagtgctgggattaaaggcgtgcgccaccatgcccggctataatacatttttaaacaatgtttgagtcttgtgtttctctggtaatgtgagtccataggaaaatgaaaccaaccccaccaaaccctctaacaataaatgagccctgcaataactgtttgaaaagtgagttggacactgactaaccactgattttctcaagtactgttggggccattctaagctgtagaatgtacagcacatgagaaaagttagtaggagctctgtcatgggtgaaactaaaaaacatcattgaactataatattgaaactaattccctcgccatatagatcccattccactaaggtgttgcaaaaagaaacaaaaacaaaaaaacaaaacaaaacaatcaacagaaaaaccccaccatcttctccttggatgaagtgtccagacagggaagtctgtaaataattaaaataatgaactagagtacaaaagacagaaagacagagtgacagagacagagaaagggatggaatagtggaatccagtggaaaaaattatgcactgaaaaatgttgaatattccaaaatataaaattaatagaagggaagaacttttttcaaaagaaaatactttccatccttcaagagcagtgcagaattgatggcctgatgataagaagcctttttagtgaggttcctgggaagaatgtggtcatcacagaggcctcacttggtcttcagtcgccccgggcagtctgatcagcctgtccttgtttctagaactatgtaaaccaaatcaggatgaacgacacatggtttaatagttaactttcagaacaaggggcagggagatgcttttatgccatcatccagtcttcattccaatctcattactgaagtctgttctgagaacatttacagctttccggagagtctaagcttggcagaggcctgaagatggaaatgtagcttaatgaccatctcgttctgcagtctcctttattcaggtgaatccttgcgatcaatcattctctgtgattcagattattgttattaatgttgttttgtggttattactagccctttcttatcatgggaggtagctttccactttcctaatcttaaaatatgcaaaatgttttctgactacccggagtttttctcttagtctctgaggaaatcagtgtcctctccaagtaggaaatgtgagatagtttgaaaagtacttgggtatgcaaatccaatcctgctttttacagatcagatccagaaaatatcatagaaacagtcttttatttgacaaaggacagaacaaatgaacagagaaaataatattgcgtgatgtatttagtccatgggattcaggtgtgttttcttgtggggttttacctgttctcctactttcctggaacccaaattagatactttctggatagctagctaacagacactctacctcttagcatctctttcatctcatcagaagggaactaacacacaggctaggtcttaacatacataatgaacaagttttggggttttctgagcaagtattttaaacaaccgaatgagagtagcctcttgttaagcactgagttcatgaaagtgtctggtatggagttgatattagaatatcataattaaactaagcagcaacaataacaacagtcgattaaatgtttcttattttgtcctttttaattccattaaaaaatataccaccataaaatacttcagcaaacagaaagagcatgtgcctatattttttatgtgttcatatacctttattatggtccctgccacacattaacattatttatctctgatgtctcttgggatcatctgtgtctgtgttgctctcctattaatgttcctggttgtttcattctctggctttatttgatctttttatctatgctaagtagctccctttctagcctccctgtgcacacttggacagatgggtgcttttctctctcatgccctttaaagaaagaagacaggaagaggagattttgaacaatattttaccagtattattgaaaaattattttctgtatattttatattcatagacagcagtgacataaaatgcaaattctattcacatgtgctctctctgcttttattatggtgatagtgctgtagcatctaagcacttcttatccctcttactcttgtttaccaccccatcactccaaagtgcttttgacaatcggagaatttcattagcaatccattccctactttttgtttttcaggacctttacatgtaaaaatatcagacatcttacttcgtagctatatcagatgaatagcagtaaagcaaaggaacacttctgacatgatgatagtggggggaaagaccatcccaaagtatcttctaacattcagtttgtcatatggggtccaaatactgatgtagaactctacatccaaggtaaagctgactccttcactactacttttctttatcatcttctctgccactgtagtaatgagaagtgtgatgtgaggaacatacataatgttcacattttacatatgtaaggatcaggacaattgtaccttttcaaagaagaatctctattgatgtaaatatcccttagcacagaactatagatgccaatcttttgttaaaagctactgttattttttataacaaaatgatgaaaatttatttattaaaaggttcattgtcattatcatggagggtgcgtggttggtaccttaacagtttgattgaattaaaatcaagttcaagctggggtttcttttgcagctctattccttgctttctctttgactccaagctaattgcataacctctggttgacttgtgcctcgtctacacattcaaagtaaaaatcagaaatgaggttattatctcactaatgtaggctggaacattatttctctaaatatttctggaactgcatttaagatttctggtcataaaaaatccagagtcttataaacattctcctgtagccttagacatctgccctatgggagaatatacggaaggtcacacacagatcggaattcatgcagtaatcaaactggttttgatgttcccttcctacctacactaagcttcttactctgaatctagaatacaaacttgcaattttatttccagcaagtccttagtgccgtgctacaattttatttccagcaagtccttagtgccatgctgaacaagagacacttcttgattcactgccctaagggagatgtagtaccaataggggggtggggggggggcactcagtctcttcatgccatagaagtaaagtgtcagactatagacaggaacctagaccttccagcttttaatcctattgtcttcccaagacagtgtattttccttcactttattttgtgttttcagtgactctcagctgccttggaatcctacagtgtaatatagccctgtaaagaacagcaattggacacacgcacatgcacacacgcgaacacacacgcacacacagatctagtagtttatcttcttaaacttgtggaagagcccattttagtgatgagttttggccaaagattattttaaaaccagtcttgtacagccttttgggttaatgagagcagtaaagaaataaatcatccttgttttcactctttatggtcaatatatagatatgaaccagtttatgaactatagccaaattccactgtgacaatatttcattaaagagttccaatgcaaacacatttgctcctctgcaaacacatgacaacaaagtgcagcacggtggacagccaaaggcaggacagctactgcaaagaagctgaggacagccctgtcctagtactgtcccctcctcaggaaacacctgctgcgctgggactgcataccgccttgcttctctaacatgtcggagtgataaagagatctgggagagtttcaaatcatgtctggattgctgtgtgaaaaactcagattgaattcttctggactagcatttgatcatccattactatcgaaatatttgataattgtaatgtgtaactaaagaattacttttataaagtttgtgagattcagtattgaacccaaacagatatgagatcatatcttggtgagttggcaactttaaatttggtcatttcttttagcttttgttttctagtttataaaattcaaacattaatagtcttttaagctgtttgaaagttaaatgagatgatataattaaaagtttggcatcatggtgcttgactcgtgatatgaatatattacatatgagctgttgtggcgaagactctcttttatctctaaagtaaggaaaatcactgttagaagtgatgaacaaatgtcttaaaactctgtatggatatgtgtctgccttcttgtccttagtctcttccttagctccagtgtgttgttcttgatctatctgtaaatactagtgactctgattcctctgtaacattggtacttggcagaagcaatgtgaaggaggacagatttatcgtagctcacagtattagcaggtatcattccattttagcagggaaggcatgggaatgccctcaacttaggggagccaaagaatgcaataaagtttcttctcttcataataggccaggaagcagaaagtaagaggccagaaccaggggtagccagaggctacaaaggctggctgtaactgatgtacttcaaataggtaggccacacctctctccatttccacagcaggccagcagcttggatacaagtcttgatgacatgaccctatgacaaacatttcaaactcaaatcaaaacaattttgttaacttgttagttagttgtttagtccaactaagactgaacacgtgaaaataatataaatccactggaactctcataattgaaatgtaatagactgtggacatatatacagaagtcagagctttgcagatgtgtctgaataaacctagcatgcccctggggttacttatctgccatcactcgctggccatctaaacacagccatttgtagcttcttctcagaggataagtaatgtccttagcctgccgcttaaatactcttcatcttccctgactatttactgtaagtcttgtgtgaccctgataattagttatacatatgagtaggttaaatttgtgaccatcatgatttataagtatattttcttagttctacctatgtttactaaaatagctttcaatcattttacttaataagtttaacagttgaatcattttttataaaagaaaaaccatgtatttcttgaagtaacatgtttttggatggactgaaaagaatcatttgcgtatgcaataaaaaatacacatggttccattttccttgactcataccacagtatgtactagtcaagtcacatgcctaaatttggggaattttatagcaccgtgtcactaagttttgggcatataaaatactatttgcctggcttttaagtttgtggatcttacatggggcctggcatggagataggaaggacattttttttccattgagcttttactctgttttgaaaggaaaagttgaaacagagtccctactgagtttttcacatgtttcatggtggtaaccataggaaatagggaaacaggaaattgttggacagaaggaagccaaggagtccatctcagcctgtcctcaccttttagataccatttgggcttgataaaaattatttttatctaggaacagatttaatgctttatgtttccataatcttattcaaaacagtagagaaaatagtactgctgattatgtaaataattgtattctaaacagaactcagttcttatgttctgaaggaactgatggaaacattccttcagatgccaatagatagaatcgtggaagtctgcatttgtagaagtccatttggggtatttagaggaattctcaaaggttgtcataatatatgtactatacatgtgtgtgtgtgtgtgtgtgtgtgtgtgtgtgtgtgtgtgtatgtatgtatgtatgtatattccagatatgaggaaaaattcttattgtacaaaaatatctgggcatagaatgatgatattgttaaatttaggtcacacgcatcttcacacacaaatgttcttcatcctgctcacctttctacttcttgacctattcagcaaaactgaattctcactcactgtccatattcagaagtgctgtatcatgaaaattaaagtgcttatcaagcacagtgatgttcttccctgcaaatggaaacacacattttcttgactgtttaaagtacgcatgcattcatttgtttgtgtcctacctatagggagcatgttgtgaataccctgaccaggtaaagctctattaaaagtcttatcatctcaagaccattgtgctcattactgtagtttctattttctttcatatgctgaacatgttataaaagctatactaaagatatgacttcctattcttgttttatttaattggtgaaatacagataccaagtagtagtcatggcgttgtctacacgtggatacacagctcttcttttcttctatctagagtagcatgttgctttgaaaggatttgtacaatcccacaataataaattaaaaacaaacaagcaacctctaaccagatcataaagactgcttctgatgactggccaatagcatcgctcttcccattcttagctgaaccacaccagttgtttaatcttagatttttcacattgcacagttagcttttttcacagtacagttttgaaagatgagcactgtatacataaccatgataaaatgcctcctggatacagagcctttaaagtgagtgtgtgcccagaggcagggagggggaggtctgctcgaggttgaaaagcacagtgatgtgtcagaatgcttgtgttctgactcatactgacaccgagtgacttgtcactcagggatttcaccagttcccacatctgactcagtgacagtttacaacagtctgaatttcaataattatccaagtaattaaagtcagaaacattttggaaatgttcaatattgtattacaattttaaactgtaaataataggtttctcatgagatagagggccatttttgttatgttaagttctcttcttccaagtgctggcatctaaattaaccagagtctggtctaagggcccagtaatagttcatgatagttaaactaataaaagaaatgggagatacttagagaagtatgtaatttgatgaaatttgtattccttggattctctaatgtttgacacaggatgagttgaaagcattttttttttttttttttttttttgacaatggaaagctcttgtgggctagacaagtttttctgtaaaagtgtagtactcaacttaattgtgccaggagcgtatgcagcctggaaggacagacacatcagtgcagactccccgttgacagtggctcctagcggggcctgagggtcctctttagaatgagccccactagtgatttgctagcccatgttctagaaactctctctgaagtttctggcagtcagtcagtgctctagcttttaggatatgtggttccttgttatgtgcagagttaaagagattacgtaatgttctattctataaagcaccacagacagaacattttattttttcagtatctttggacttttctgtttgttcctaaatttgcatgttttagcttaggaaagaatacaaatagatctgttttgtcagaatttttacttaattggcactataggatctatcagaccagggaatcttttacaaattttgggtttttttttcttttttatgcatatgtccagatgtctacacaaagctaaaatgaattgaaagaaatagcagttctatttaatgtagttaacacagttttgtcatgcaagggcaacgacatctgctctaacctctcacaaatactcaagtccataaggataaacaagaaacatccccgttactgagaaagttttattttttaaaagacaacctctttctctattccacatactcaattcccttgtcattttacattataaataaataacaaaccaatttggcacatgcccaccgattaaaaataaaagttgtcagaaatgagaagggaaagacaaaaatatgaattattaattataatattaagcagcataaaatgcctaacatgaaatgataccacctacaagaaattttatcaaaataaaaatgagacaatgatttaatatttatcatataaaattacattgatgtaattttacatggtaaatatatttatattatctagtacttgaatcaaatttaataaagagatattttaatcattgtaaataaaattcacttctgggatagtaacataaatggaagtattattttaaaatcatgtcccggctaagttgtcttactgacctagtagctttgctcactgtaacattatatcctgacatattagctttaagatgttcaacattttaaaaaacaagaatgcctaattaacagaagggatgatgctttccttaggatattacttagaaatttacacccctgattttgtatggggattaatattttttccatgcagggattttaaaaagtgtatattaaatactggtcatcaacaaaatataggatttcatcagcatacacacgcagatatcaagagatgcaaatatgaaggatccctgcaaatatttcttcctgtgtcttcctccaagaggccctgtgatatgtgaacgtgtgaacggggatgtgtgattgcatgtacatatgaaagccagtgcatatctaagaaaactagcctttgtgttttagcactttaaatgtttgttttgaataaattttttccacaaactacttaaaattacatttgaaaactgaaaggaactaccaaataattgcctacatttaccacattcagaaaaatttcacaaaaatgaatgtagaagactactttgttgttcccttgaataagagtcttgctcatgtttagtagtagttttaatactgcagaaacctccatgactcgtgataagtttgcttgttccacttcagttgcttttgttcttttgatagtttattctttcaagcatgatgttacattaccatctcaatgtccttgccaatctttggtttaaaatttaagtgaatttagtactctttgaagagtcggatccatatccaagcaaaggacaaaaaaaatctttttaaaaaatttttaaaccataaactaacaatcttgcttttgttacctttatgacatgtgtttaagaagctaaattcttagtatcctatctaagaaaaacttttgtgtctataatccattggcactatctgccatcatgggtactcattttaatttacattctttgtgagtttctagcactgactctttgaaagctttatccttgactaaggaaaggtggctcagtgattaggggaactttttgctctggcagaggaggaccccagggtttgattcccagcattcacagtgtgatccacagccatctgtaacacccgttctgaccctcttctgatctcctcaaggaactaagtgggcatgtgctatacatacaaatgtgtaccaaaacactcatattcctaaaataataaaatatagacatgtaaaaggaagaacaaagagagtatcccccacactgttgtggccatggaacctcgggatttgtgtggcacttcatccacagtggtatattcacagatattgtccccacagtgtaacttatgcactaaagaagctttatacgggaaaacttcttgttgttctctcagctctactttctctatgatcagacgccctcagacctttcagtccagacttttacccagaactgactttcctggctctcacagtcttcagtgcttcggagtgtttattaagcttggtcttctcttgtaaatcatgtaagtttcatggccttccagttttcttagtatattcctctggggttcactgatttccactgtgtgtagcatttcacagctgctgtcatcagctgctctcctctgctgagattggttttttccttttttagacagtctcccattgccaaggctgacctccaattgttatgtagctgagggtaaccttatattcctgatagtccagtttcttcttctccaccactgggattagccatgcgccactgcacctggagctggtgggcttactttttaataattctttgtttgctcagtttgggtaagtgttagtcccaataaatttgcatagtggttcatctttgagttttagttcttaaactgctgagtaaaatgagaaagcagcatcaacagtgccagaaagctgagttcaggacaaactgaatgaccccttgcatctctgatgaatgagtcagagatgaagacatagtagtcaaagaacattttagcatcaaagaaaaagtaaccttaacaagcatcataaccaaataaaagataaatgattattaaaaatctgatcctaaaaggtaaccacaagaaagaaaccacggtttagatgtataaatttgttaatcattacatttgatagtctttccaagtttttcatatgtaaggcaatacattgagcaatatgcattccttgcctaatttttctttactacaaattcctcagagtacgttttctgttatttccactatgctgaaccaatgaaaaccagggcttagcaagtttaagagtattgcccaaggccatgaaagaattcagcaagaggaatgcagagccaggatggaaacctaaggtatgttcttaacttttgcagcatggttccttccagtgtatgtagtatcttttctggtttatcttactttagagaaagctcatgaaagagctcaaagtaatatgcttcacccttcactgctataaacacttgaaagtatactgttatagagactagtaaacattttgagaaatgattctttcctcaaattaggaaggtttcatcttcaaaggcagatagtcatttttggtttattgacattgcagaaggggggattatctgaggttcttcatgtaacatatttttagagaataagcagcacttttgtatctataaattacatgttcatttaaccaatatgactctaggtgactaaagatgtttccattgacatatttcttaattaccaaaggttaaatcataaactaatatattaaaataagaaactctgatacttttagataaatttcatctactgaatgaatttaagacaaagtggccaccttttgatatttaatgttcctcaacgaaaaagtatcactttatttaaacctgaaagatttagcagccaatacattaaatctgatttggtctcatacatctgcagtatacagtgctctaaactgtcaactcaatgaataggaagtacagagcctggagccagcagtgtgagatagagggaacacatagaacatctgcagaaaatgtttattcacttatttagtacaagcagatttgccatttgtaactaagccttactgtatctttacatttgaaataataatctcttatgatatgttcattttataaattcaaattatttgctatattgagcattagaaagcaaagtagtaatattatcaaagtgaataaataaagaaatggaaacttaggtttgaattattatgtaagcttcagcctttttatttttatggacagtaaaataccccatggtgtcaaaagtcttgaaacatacaataagtacgaatagtccatttttctcctaatatcttttcttccaaatgccagagttttaatttgaggccttcaaaaaacatatttaaccctctttatatatgtaaattataacactcacctctgatactttgaattctatatattaaagtttgcttgtcattctcatcaaagtagtaacttgatatcagtttttaaatattttaactaactcctgaacttttgtttaagaatcgctttgtaaaccctgggaatgttaaatagtttgagagaccactaatttacttctaacacttttaggatatagtcttaattattgttttgttttcttgcttctttattatttggagtcaatttagttttgggggtgtattatcttgaaatcttcagcttatttaaataacttttcaaacatgggttatgttccttaagagcaagaacctctttttttgtttgttttctccatgaccataagtcttgccacacactgtttcttcagggtcccttaattaccggctatctatgctaaagaatttggcagaggagttcagttctcagtttgggtggcccttcatctcctccacactccgacctccacttacacctctgggcgatatggatagcaaaagccactcaaatgaataggaagacattgcatttcacactaaaaacatgcagttcagaaaggcaatccagaggcccttctggattatgcttttccaaactcctgtaatgcagaaaggacagaggtttaagagtgaggaatgaatggaataagaatgctacagtgtaggaagaaaacaaaccattttcattatagaagcaaggcacttgtggcaccagcagtgcctcctttagaaaatgttcgcatactaaagaggaagcagaaatgtgtgctgcaggtgaaatatcaagtccctcgcaatcaaaagagtctggtgtgacaccaaccgtatctcagaaccataaggaagaagcgggaaggtttcagccttccattggcttctgggcatccatatagacttagccataaggaactaactgttgggaaacccaggcctattgagctttctctgtgaggagccagtggggaaggagagtaaatacaatatgccatgaatgcacacaaccctgacaaagtctgtgtttagaaaggggtaacatttcctagtaacttatttggaaaaataatttttataatatatgtgtttacacaaaagcaataaaatgtcttgtgtgtgttggaacattttccttttatgtctggtagaccatttactttacctcctcttcagtgtctgctggaacatttattttatattctccattccatttctgttggagcgtttatgtatgatttgtttgttacttttatctgttgatcttgccctccccatatgctcatgtctgactggcctagtttcccacattcagtatgtgatctctagcccttcttaaatattaattagtgtaattgaattccctccagtatttctaaccccaggcacctgaatctcagtgtttttattagaactgatttgtgcatttaaagcccaacctgcctccccatcccccactgcccaaacaacttttcttgattaggtaaaggtcggggtacatgattgcctcagagaaagactgcatggaaaataaaagcattatacattaccaccttttccagctaaaggctgaaaaacagaaagctgttttgaattgttggcaaaggaaatcatccatagtagacaggagaaggatatagctctttctaagtacagtaacagggtttaaatagttccaccatacagagccatgtaaagagacagatcaaacccccctgtcttcttccagcccctatggggacttaagaatgacaccttgtttaaaatcctctctactgtcctggtacaatggtctctctctgacaagcattctgttttagggtgctttcctgattatgcagagatgacattttcctaggaaagtaccagggaagccaaagagatcataaaaagtgggatggagtaccagagatgagacaaaggatttgtcagtaagatcataagtttttgccctattctaagccataagtacaaaccaaacaaccagaaatatgaaactcatttgtaataagtataaaatatcagtttgggagaacagtttgctgtcagtttgaagcaaaagtctgaagtggaccatcctagcaattaaatatcatgtgtcatgtgcctctaaaataagtttttttctggggaggagaatgacttcagtgaacgtagtccatactgtgtggtacagtctctcctgagctatttgtgatgatagctaactcagtaaatagagataagattagcaattccttgaatggcaaggccaaatatgaagatttttttcattttattttacatatgtgattgttttggctgcatgtatattatgtataatatatgtgtctacagaggtcagaagaaggcatcagatccattagaactggaattacagtagttgttagcagccatgtggattctgagaactgaaccccagtcttctacaagagcagcaagtgctcttatccactgagcagcttgctagctctagctgtactattttctaaatactttttaccaaatctgtttgtatatactttcttacttgcatatgcttacattctgattactgtcactgttcccctctccaccccctgtgctgccatttaaccactccttccttatgacaagtctcttccttgtcactttgttttgttccgtgacttagcccagtttgattagggtcatctgtgtaaccgtggtttagagctttccactggaaccttgtgggctccatcagtgggcatgtaactgaaaacatcattgacttctcttccctcagaatccatcagagtcctcaacaaggagggttagagcactttgaaaccttccccaatctgtgagtgactgttggcaggtctagacttgtgcaggcagccacaactgctgtgagatcatttctgaatagattgtgtcatgactagaagataacatttcatacttcttctccccattgttcagagcttacattctttctgcccactgttctggggtttttgctaacaataagaaggaatagaacaaaagacctttttaggacagagaactcaactgtcatttcctctctgcaccttgatcagcagtgtgttctgtattcctgcacagagacactattctgactaagtagcatttgtctatgatacagacatactgatttagaaattagcttgatgccatggtaatttagctaaacaacaatattaagttttcctttacaggctaagacttcctgagctgttgtggttctttgaaagactgttggatacagtcaatggcctcattcccaaaggaaagatcatttctttcagaatcaaacctgggtatactaggctttatcttggtcaccaaggtgttggatgttgttgttgttgcttggtggctttgatgattatatgttcaccatgtctgcacctgataggacttcagatgtatagaaaagctgttgataaattaaccatattcgcaatgcacattcaaaatatatgatgcaccacatctaatcagataatttttaaaatgaataatggaagattctgtgtcttcatttcaagatgactcatattcatggatgatatgcagaaagatattcatggatgatatgcagaaagatgtcttaaaagctattcattagaaatctaaacaaacatagacatcctcagaagtaattgacagatcaaaacaaccctgagattccacctaacaccagtcagaatatctaagatcaaaaactcaggtaacagcagctgctggcaaggatgtggagaacaagaaacactccttcattgttgatggggttacaaactggtacaaccaatctggaaatcagtatggcagttcctcagaaaattggtcatagtactaccagcaataccacacctgggcatatacccagaagatgatcaaacatgtgataaggacacttgctccactatgttcatagcagcattatttataatagccagaagctggaaagaatacaggtgtccctcaacagaggaatggatacagaaaatgtggtacatttacacaatgggatactactcagccattaaaaacaacgaattcatgaaattcttaggcaaatggatggaactagaaaatatcatcccgagtgagttgaccctatcacaaaagaacacatatagtatacactctctaataagtgggtattaacccaaaagctcagaatacccaagatacaattcacagaccaaatgatgctcatgaagaaggaagaccaaatgatgcttctgtccttcttagaagggggaacaaaatacccattgggggagatacagagacaaagtatggagcagagtctgaaggaatgaccatctgaaggaatgactgctccaactggggatccatcccatatacagtcaccaaacccagacactattgtggatgccaacagtgcttgctgataggagcctgatatagctgtctcctaagaggctctgccagagcctgacatattcagaggtggatgctctcagccaaccattgactcaacacaaggtccccaatggaggagctagagaaagaacctaaggagctgaaggagcttgcagcctcataggagaaacaacaatatgaaccaaccagtacccccagagctttcagggactaagtcaccaaccaaagagtacacatggagggacccctggctccagctgcatatgtagcagaggatggccttgttggacatcaatgggaggaaaagcccttggtcctaagaaggctcgatgcccttctcaggtagtgtaggggaatcccaagacagggaagctggagtgggtgggttggtgagcagggggaggggggatggaatgcggttttgggaggggaaaacaggaaaggggataacatttgaaatgtaaataaagaaaatatctgataaaaattttttaaaaaataagaacaatggagcaaaacattttaaaaaagaaataattgacaaggaaattagaaaaataaaatgaattgtacaagaaatagtgaagggggttagaattgtttgaaaatttgggaagcaggaacaaagctgtcttcatatctatgaaggcaaagacagttacctacaagctgagctaagttggcttctgttattctaacaaggagaacatgagaattgatgaacccctcaagaatacaaaattctattcaatattaaaacttatagagtaacaaacacccttatatgttcaaaggataaaaacagaaaaggcaggaaatatattagattacagcatagatctagttgaatctcagaaacagcatttaatgattctttgtttgggggcacatttcttgaacttctcataatctgtaaactcactttaagaagtcactttaatgtggctttaagaatttcctattgggctaaagtagacgtttagtgttgatgttagtcaactagagctgtcacaagagaatagcacaggtgtggagtttacataggaaaatttatttctcagttccagtgacacaaagtcttagggagtcagaaagtttggtttctcctaggtactcacttcttctatgtcttggagtgacctttacgtcatgtgatcagaggttacttgtgtcctcctctttttatatggacaatttcttgttcttttatggcccaaccttatgacatcatttaatttcaactactttttcaatggcctgatctccaaagagactgacattagaacttaaatgccaatataggagttttggaaacacaagtagttaataacaggatgagatatctataaattgtaatttcccaagtcccaactagttaaaaccatcattttagtagttgtacaggtatgatttcaaaacataatattaatgattttactaatgctgatattttttctgtagaaataaaatccaagctgtttaatggcgacacactcctgtaatcccactacttgagagtcgaaggcaggagcattaaagatcaaggtcatatttagctatagtgtgagttcaaagtaagcctaggaaacatggcaccctgtgtcaagggagggagggagaaaagaaaaacagaaataaagtgcaaaagcctctatgaagcaactctgaagttctacagttctctaaaaactcaccacagcatgatggttgtctgcaatataaagcactcttctttcaataaatgtttcctttagtatctaaattcaattttgttttacaaatatttacatttttgctggatctcccttgacttctgctgtccaagtaaccaatgtggcttctggtgaaactttagccgcgtagggaggaccttcctttggccaaacctttaaagactctaagtcagaagctgtattattaaataatagtaatagtattaataataataatcatgggaatgaaaatttaactatctcaaagaaaacaaaaatcacttcaacacaaatcacaagtaaaactgaaaagtggtgtgttagctcatcaaagagatttcaaagcagaaatttataggttttcaactgagttcaaaatgaataatgttttactttgtccatagatatcttgttgtttctgctttttaaaatatttatatgtcccaacttacatagaaaataaaagattaaagttgagagtctgtcagaggttagcacttaagttggctattttcttggttcattattcttgccaagactcttgttatatgaacatggttagattgactcgtgtctgtggttacttggagtgacttttcaaagtcaggactgtaaatcagtgaagtgacacaacatctcttttgactgagcctctgtgggcagcctcagtaacactggaaggagctcatcctctcaaggaagcactaactaaggttaaaagtttacagtagagttgggcatgtaactaaggcgtaggatcctagtctaacctgcaagagaaccggggtcacagaactgcaaaaccagacaaaccaagcaaaaccccagaacactgttaatgattctagttctcagtaattcactcagcctcctatttgggatcagttactgtaacttggcatttgcagtaagaattgagtttgtggtgtgctgggaagagtatagagctctctgttgaagcttcttttaggtgtgctttgcttgacacaatatagatacttagtaaagattaatttctttctatttttcacaaactttaattcagtcctctgatgagaataatgttatttttttaaatttatctaacctatagaattctgacaacggtccaataatatggtgtgaggctataagctgaaaaccactttacaggtactatttctccagcttctgagtgcatggagatgtttaactagaaatggaattagggttacccacggttttacatgcatgcttcttcctaagagacattccaaggtgcatcttgtttgcttttaaactacctgagctgatcttcagagtgaagtatttaacagcaggtattaaagtttatgtctatttttctgtggaggataagaaaataaatcctttcagtttctccctcactcttactgcttctacattctctttcctgtaaatacatggacagattattgcctctgtgtcttggagttctgggtccatggtatgtactgtcattattctcattgcattgtggtaattattgctattattattattaattatactttgtaattatatagtatgcattaaagaaagataaataggaaataagcatgttgtttttgaaatataacttagagtttagacatttctatatctaccttaatctgttttcctacaaaacttttatgtaaatcttcagttacaacttttaaaaaacatacctttgaaaataaagtaccaacctaaaaaagatactgtattttatttatccagagatctttatttttaaattcttaaaatagattttacagtatggttgctatatggtataatttctcttgcagatcattttggaagcgatggtggtgataataaaaccatgacccacaattaagaggaatgtcttgttcctcctactgacttccgatcacctgttgaaatcaaaggagaaaagggaaattgagactagtttgtggattttagtgttgtccggcactgcttgatagaagctcttggaatagaaaccccactgtcttcctcagtatcatatactattattttcaggttttgggtagcattaaaaatagttatcttcaagttttcaggttggctggcccaggttcattttcagcatgggctctcattcctgcagtttggcacatctaccaaatcaagagattaggtcaatgtaagtctgttctggataatctccaagtagtttcttctctgacttacttagtatgaaagtgggatgaaaagttcataggaaatgaaaagagctgttgttgtgtcttcatttactactttctggaaatttcctactcttaggaatacatgatcttaccaccttctgcatctgactctttagtaaaggtacttccttaccctctaccaaagcagtggttctctgagtgatcagtagtattaacatggactaggaataccttagcaatgaagactccctcatctcagcctgttctggacaggaagcttgtatgtggtgtgtacagtatgtattgaacattctgcctgggagactcagatgcttcctgtaggcttactacatcctgagtgccagtcttccaaagagatattaagttccactaagaaactgctttggtaaaagccttaccagagaaatgcaacccatttcaaagcttgctcttattcttctcaaagctcatcatgcagtttcatcctgatgggtttaattgttcccaaactttgctaaattctaaaatgatctttgtgttgctctgtagccaaatattcaccttggattattcaatgcagatcctccctgccaaatacttaccagcaataatactgttctcttaaatttcttttcggtagttcttaatgcctatacagttcatttaagtattgtctatggtgtatcattcatatatacatatatgtgtgtgtgtgtgtgtgtgtgtgaatatacacacacacttgaaaattctgttgtgataaacagtgactgtgattattaagttctcactcaaatcatcagagtttccttaaagaattactatgactctgtttctgacacattaagtagctaacccgagttcacattatatgttatgtgctcaaaaggtgctcctgtcatccacatggccactaggacacattgccttggagtagtcactcatttctcatgaggatgtctattttacctctagcaaaatcatatactcaatgatcattaaagacctcagtttacatgttatgttgttttattaatttttttaacttttaaaaagtctatgcatgtgtgttcatgcatgcgtgtgtttgtgtgtttctctgtggtttatgcacatgattttaactattgagctatctcttcagcacccctgtatgtgtgtgtgctctctctttctctctctctctctctctctctctctctctttctctctctctctctctctctctctctctctctctctctctctctcacacacacacacacacacacacacacacacccttacctgttgcacaatatagaagaagtttgaaaatattgagtgtcacttgttagcataatgtaatattgtaaagtttaaacattattctaacctttgcttcactacttcttccttaggaaaatcttggaaatggaatgtttaaatttctccttggattcaaaaccatctccatttaaaattataaagattcattgtagcaaactaatgtgtcagttgcatttattaataaccattagtgcatttttaaaacaatctgttcttgttacatttaaaataggaaataactgattttgtttatttgaagaatttactaattttcagaaagctactttatcatttgtaaaaaagaaaaaggatgaattgataagtaatctagtcttgcttctatattcacatgtaccaactggtgataaatttataataatgctggtaactaaagggtaattattcaacaatggtgcttagctgaagaaacctgaactcttaatgtggtgagcatagccaaactctgtgaacatattatatttgcatatgacttttattaatgcaactaaattcatgcctaagaaatagaatgcataggctttcttggatcaggtcatactttgtagttattttggaaatgaatggctggtttttatatagatgtcattatcaaagaaagtcctctcaatcctggtaaggatcagccagattgttgcaaatgtgcctatccctcgattctaccctacaaactgaatcagaactctgggattggagcccagccatttgcatttctaatgatcacttccaggtgatgcttacactcaggaaaatgtgaaagccatttctatttggattcattctctacttgcctggtgaatgaaattttccagaaaactgatctgtgagttctaaaactatttgttttaggcagaaaggctaggtgacagccttcagcaattactatgtttgcctttaacaggctgttattgaattctgacattttgtgtactgggcactttatctaaattaatataaaaccccagtagctctgtgagacacatattcttgatcttatattaaagtatgctcattgaggcttagacaagtaaatatctgaagacagcccaacacactaattgaattcgctttgactataaaatatatgttcttaaactctgaagtaggacttagtcagaattttaaagccagatcatctcaatccttcctttctcttcctaacgactcctgtatagaaggggtaaaagagatgacagctaatttcaagtttgtttccaacctcttagattctatgtcaggcaacagtcgttgtaaattatatagttgtaagctctgatgtgatcatgtgatcatctcaatcagtaggccttcactttcaaggggatgacctagaacaatacaagcaatgccaccatacatctgtctagttcatcgtctgccttctcctctactgccctttgcagacatattttctactagaaagagcttcttaacttctaattaagagatttcctacaacaatagcaggcctcatttcccttaacaatggcttgttttgataaatcttttgcaaatacagctggtatactatctagctgattcagcgcttcttcttaactctatactcatatcacctactaacttagagcatagagaatttttttctagattctagagatctgaactatttgttctaaaatgggggctaggtgtcccatcctttataaaacctcatggttagatctgtgagaatcccagattctcaatcatcaatctctctaaagaattcagggctatcaagtgtaccaaggaatgaattgaggaagggcagcatctctaagtcctacagtgagttctttgaaataaaatggaacctccgaacaaaaagaaaggctgttgtttaagccaatcagatgttcagattgagtctgagacagtgaaaagaagatgtcactagggcattgtgctaagtggaactatggagcatccttttccaaatgccatgaagtttgaaaagacctgcagtgttgaacaggcattttgtaaaagaaagtgaagtcacaaaaatggcagcatgtttgaatctatttgtatttccttttgaggaaaaaaaaaagagagagaaaagctaagggcaaaaccttgtaaatgtatcttgaactgatgttatttttgcaagttagacagacatgaggccaccagtcagacagtttcagggctagctctcatatcagagcccactcttcaaatcctagccctaatcagaatgataaagagctgcctttagattaatcctgccctggactttagacgaaagaaacccgcagtttaattactgagtgaaattcactttgtctgatctgcctgtctttgctgtaatgtcataatataatcagcatcacccctatttgaaacacggagctgtgaagtccaaggacctgtatgattggaagacataaaatgatgcgcagacaacaaccagccacggtgcagtaattactcgaaccgtgttttcatctgtatgtcattctaccattggcttggcatgacagcagccgcggaaaggatgggagggagcctgattgaaaaggagggtgacccacccgttcgaagccgacaaggtgtgggagggaagagccttgctgtataaaatcttaaggctaattaaacttgctttttttcctttaatatatattgcactggctgctgtgagtccaggctaaactattcagctgatgtctccctgcaattaaaatctcctctttagttgaaacttgtttctgcttctctgaaaataatttatttttcttttaaaactggcagttttggcaggtccctccccccataggtttccatgtaggttttgcaaatttaaaaaaaagagacagaagagagttgcagtttgtcttcccttagataacagcttccgggctttagtttctggattttgcatggacccattgccattacataggaccattcaacccacacacatctgttttccctaccacttacttccccagctaaaaatcaaatgcttaaagtaacttgctctgtgttgcatagttggaattgtagctaagctgtgagttgaacaagaatgcatttgaccctacaacaccgagccccttcattctcactgttgactacaatggtttatttgcgccagtgcacacattactttttagtataccttatatgctcccgaagtgttccttctttcaaatgtccattagtgaaagcaggagagaagagtctgccagtaccttttgaagagctttgaggtttacatggttcggttttgtagtttctattgtaaataaagatattgactacaaaaacaattgaacttttgagaacaaataaacaaaatgaaataaagataaaatttttacttcccaccaaattctagcatcaggactcccaaggatcttgggaccttatgactcatgaacaggcattgaaatcctatggagtataaacacataactcaccaccaagattcttatggcagaataaggagggctcatgggttgagagaataggatgtacaatcagatgacctgtgtttaagtcctcataagacattgcttaatttgcctctgtaaaattaaagccggtaccttttaacttgttagagtcaatatgcagatgaaagaaaggggttaatctatacaaagtgcccagtcccgtgcccagcaccagctagcatattaactaccattactacccatgcagtatctccagactatacatatacatatacatatacatatacatatacatatacatatacatatacatatacatatacatatacatatacatcatcatcatcactgtactctgctattgatcccgatcagtcagatcatataattgctgggttatcatggcagattctgcatgctctgcttgtgcctcctttattctagtttctaattattgataacaagataggactttgatcaggccactgcccaatttgcaaggctttaattcatgtctttttccacaggacaaaagtagatctttcagcatagagttcacggagccctttccccttccaccgtcagctgatctctcagtactgtctcctatacaatccctgccaacatgttcacttgttgctacaaatgcatctttcagttttctgcttctgtgctcttgctcataccctcacacacctgaatctcatcaccaccacccaactcttacacattttttcaaagttcaacttgatttttttcatcacaatgaggttgtccgttccctagctatatataaatgatggtattggttatttctaagtcaccattctgaacacatgaattcccttgcattatatttgtctatctcacttaccttaagcataggtcagtgtctccatgcacagtattgtttattcagtagcttctgtcagagatcccagaggtttttggtacaggataaatgaatgtcaaatgagtaagtgctcaaaatatggagttttttccttgttctctttttcaatattaatttgaattttatgctttatatatgtcatttaaaatttttttaacatctcttcttccttgatcttctccaaaaactaccaaataaaacctttgcatttgtagcctctgccactctctgagcttgcatattcctatggaatctaagggtcgtcttcctcctccctcagcactggagggataacaccttagctatcaaaaaagatatgagacctgttgaaaggaaaagatgagttatgttgaaacatcttataagttataaaagcttcacaaaggcaaagtataatctatgttagtaattatttctttaataagcatgccttcatgtatcaaaacttaaaaaatgggtattggacatcgtggtacatgcttgaaatctcaaccttatgctgaggaaggaattaaggagatcaagaccaccttggttgggctaaatataagactctgtccagaaagagagggaggagggaagatgaggggaagtgagtcttaatgatctcttatcatatctgttgagtttaaacaaaatgcacctcatattgaagaattgttcaagatccatttctacctttctcttgctttgtaaataacaagtctcttctacaggactcacacacatcatttgcccttgttcttctgtacgttgttatgatgtttccttgggatgtacggggaaacatctctttactctagatagagccccaatagaccaaagaaaagcttctacccatgtccagcttattgaaacaatgacttcttagaacataggtctaaggcagctatattactaaaaggttccagcccagcttggagtagctcaggagaactaccactggagtcctgcatacccatccttctgcttcttaaagctccagcaccccacaggacatgtgcatggggcagattacagtaggtgggtaagttagaatctcaagtgacagtgtgaagaagccctccttctttctaagagtacatggaaagagaaagaatcgactttttgtgagggttcatcacagtgctggttgaggaaaggtagcagtggctgatgtcattgcagaagaaatagctgtccacctacttgtatatggcaagtggaggctttcctgaagctatcccctggaaccatgcatttaaagtatgctttgtaattcagaaagcaacacttgtttttaacaactaacaggaagcctctcaatagctcctacatgaccccgaaatagcatggtaaagccatcagctgtatcttacacctcagatagtaagatagtgcagacttagacctagatttaaatctagttttagaccacctagatattatgtatggatatttttaagtcaaaagccccaaccggaacatattatcatgcttaagctaccgagttacaggaagactttctaacttagtctaatgcttgggtgaacttctccctgtgcaatacagttccattaattggagatgaattggtgaacagttatggaagagcctcagacttaaaatcacattccttaacatttcagtactgtaggcagtcgtttgatgtttgttttactattggtggaaacaagccaggcagatcagcagcgttcctttcattgtttccagtggagactgcctgggtggccacaggtgagagtgagtagtagccagtgtgagcaagccatccagcattcattgggtatcttttctctgttgatgggctagagcagggagggagagagggaaggacagggtgcatgagaaaaggaaggaaggagcaagcaaacaaacaaaagaagttaggtttttttatgcatatcctccccaaattttcctgaacgtgagtatattcatatccccatgagtttcctttcacatgaggcaagacttcattgttgtaagccttgctatcatggtgataagcaccatgtggctcatttgttgcctttgcactcctcccctctgcttcccacttatcatcaggctaccaacaactgcttctctttatactggatcctctcctaagcaagcctgattaggacagacagaaaagccttccccccttccctctgacctcttcactcctgcctgctgagagttgtgagttaaaatttccaacgtaatatttaacctatgagaaaactgtttacaaacttgctagttgacaatcagagattcttcccaactccagattaatatggctaaagtttaacacagtgaaacagctcacacaccaaaataataataataaatacatctataattaaaagattaactctgggaattgtgctggtattttcaaggcccaaaatggaatatgtgtttcagtctagataaaagaaaaacctttgttagggactcaagggcctgcagagaagggagctaggagtctctgaacagcacggtcctggcctcctcctcctctccctcctcttcctccccctcctccttctgttctttctcttcctccctgaccctattagcctcctcctgagcccattcttctcctcttaaaaagtaaccattgtgccagatctatgaaggaagagtcgggcagatctcagagtgtgaggctagcctgggctacagagtgaattccaagataacaagaaacagaaatcctgtttaaaaaaaaaaaaggaaagcaaagaataataatctttacttctttttgtggcatagctcatctaagagtttgggatccttttgatggcttatttgggcagtgtttggctttaggcagccttgagctgttttgtggtaccagtgactagatgtgttgataacatttttaaggggactatttctcttcctgagccacaaatgaacttaagctatagttatagacagcagaagacaagatactacaagagaatattgtgttctctttgggaaaaaaaaagtctccatgttgttgtggttgttttccccttggagctgggattccatctggcactgaaaacatattgaggctacttcctctcactcgggaatgtcttcatccttacttcatgccatagtgtatatctcaaggatcaatttctacaagaacctgagtagaataatgaataagtgaggtagacctatgaaagactacgtgagtgtttcatgttcagtatggaggtccctgtgaaatcctgtaatgaagacactctatcctcactgtattttgacacagtaactgggatatatacttgtctagggcatatataaaatgtttctgggaaatttatggagaaagcatgatgagtctctgttttgaagtaggtagtacattttgccatgagatatgataggtaactcataagcttcaagttaaaccagagctaggtttttagagtttctgtttcagcctgcacttgaaagtcataaagttaaacatcgaaaactcagatctctcagaagtaccgtctcataattgattgtttggccaaatgtgacctgattaactcggtaagcaacatgagaatgaactgagagcaacaatctttaaataagatgagacttcaatggattgtatgtgccaaataaggtgtcagaaaaactgggaagagggtctcccagaagatagccacagtgcttcaagaaaggggatgttgctaacagtgtgatttctttgctgaaaagctgagggagatgagaagagccatgtgaccagagggtttgacaggagtgagcatggtggagcgtgcatagcataaaaggctgatcacaatgcctggggcaaggctgggaagtggggccctggtgatagtatgtttcctataaaacaaagaaagaaagtgagaagtaactaaaaagaaccatgagataaagagactctacacagagacgcctagtgcacagtggcttttgtgggttattaagggggggggggttgttttgattttgcctcacttggtaattttttccttaaaaccttctttaccaattgaaaaaaaatgaacatggataaaaactccaatgtacagtagaaaaaccataaagaatagtcaacactaaggtagtaagacgtaaaggatatccactaagattcagcaagtctctgcctaacttaaactcttccatgaacttgactaggaagctatctgtcagttttctctgatagttggcaacaccagtggccatagcgtaggctgagcagagcccatgttttcagaatatggttggacgttgcttctcactacacactactctctatccccttcccctgaagcctttgtagctctacttctacctaaaacagaatctggttcacaagaggcagggagcctattaagtgcagaagaagaacaacccaccagcaaagcattttaccagactggaaaaactgcattttggtttcatttcagccaatggaaaaccaatatgttaaccatactggctcgtatttgtggtggaaactccataatatcttgtcattggctttacaagcttttaaaaccagggaatggaaaaagaagatcaaaaaccaatagaaggggaaattgggaaatggcaaatgcaagagcgatggcacagagagcccaagtgttgtatagtgcaggccctgcagaccaaaaattattgtgtttctaacactattgatttttttctgcagctgatatttcaatctgggtgcagtgtgtctgtgagtctacgcacactgtcaagaagaaatatgatagtgtcttaaaagattaataatatcgctggtcctctggaggcctgtcttaattcactggcctgttccctggcatgtactgtaatttatctagtctgatttgaatagcaaatggcaatcggctgccattagggaaatgggcatcattcttattgatccagcatgggctggattttatttaaggagaactgcaaaatgttattaccttcaggatgaaagtctgaaaagagagattttcctgagtgtgctttggaaatgttctaccttaaaaggagggaatggattgtggatttagaaaaaaatggatggaggtgtaggaaatgggacatgtactggcttttctgcataattatttaccatccagaaagagtgctctgactactcaagggaagccagaagtctcaggtcagagggcctcagagaagggcagatcctagctgcctcgttgttcaactcaatgtgaagtccctaattcctcagaatgtttgtcagtctgtaaaatgggccaaacacatcaagagaaatgcaactgtgaagtttcatttcatgacctggaaatcttaaatgaaggattctatgggataaaacagacaaagagcaatcctgtttaacattggtgggttcactatttattatagcttcagaagagacaggtcatgtgctgagtgaacataggggctagcctcaaattccattagcggtaatgtgcatctctcaggttaacatcacatgtgttgacttttatgttcacctgttagtggcagagctagacctgcaattttatcttgttttactgattccaggaaagctgccaggattattgtggcaaatgcaggagactgtgagacctgggtctctctgccaccgggtgcaggggctgactgtgccattcctgttagagcttgttttgggattcactatgaaggagccctcacatcctacccagcctacccttcctttgtagtcagaagcaggggaaaggtgtgtgtgacaaaggtggctggggaagggctcattgctggtgaaattcttctccatttcacctccggttgttatggaaagaaacgataatgtgctacaggaaatggccaagtataaaagcaataaaataaattgaaaatgactttgtttttttgagcagcagtaattgctatatgttgtgatgtttgcataaggaattagttaatgtgtagcagaatggcatgtgatactttttatttgcctgatgactgtagtctctgagtgaatgacttattaaggttaataaagaaaaatttgcttgtgacttgtaatgatccaattgctagaatttagcatccccttatgcattgttgcctaaaggggagaagaaaaaacccacacacattaatggccgactggctatgattttttatagtggtgtgagaacaaacaatgtcttctaaattgttggtctgtctatctttctgcctgcctgggcaggaacgttatggctttcttaattctcctgtgtgatttatcatcctaaattcattgttttgcataactctgctcaaaatgaagaaatgtcattattttgcagcgaaaaagttgtcatttgcataatgcctgccattaattattgtgagactaatgcagttgttgatatttttagggcacagtggtacagcctgcaccttgtataatgtcattctgaaaacattggtagttaataggtgccacaacattgcacaaatggaaaagaagatgatgaagaagaaggggacacaatggaacaggctgtgatctttatttagctttttttcttcccctgaaatgcttagtgagtgaagactataaaaggaagcgaacagagcaggaagctgtgacatccaggagaacaaagggattgaaaagccgaggttttctatttaggctgaattagtgtaacctgggttccagccagtgtaatggaggaagtcctgtctccactgttttggcttacctgcctaaccaaagccctaaacagaatgcagggttgggcttttaaaaccatcaattagggtaagagtttgctctgaagcgcgttcatcttgtggaagaattctctcagctaggcatttggccaaagttaagaggacacaccagggtttcatgaagcagggagctaaagaataatgattttctgatttcgattaatcagtcccctgtatttcacctatttcattatttgtacataggacctgccaagagcagggaaataccatggtggtagcagattagagggacaattcatttcctttctatttcttgccatagaactcactcttgcatctgattctttacggcagtgcctactaaggctttctattacctacttcacaggtaaatgaaagtcagttataaaaattcgatcagagatgaaactcattaccctgagtctgggaggcataaatattacaagtgtagctaactgttgatctttttagtcatgggaacttaagaaaaaaacagacatacatcaaatagaatttttttcctaatttcactgtttcatgtgtattataaatttagatgtttctttttatcattaaatttaaaagacataaaagaaatggaacctcaaaagtagactgacttgctatgactgaccagaaatatttagaaagatagtgcctttcaaggcttaaagctggcattctaaactctttggaagatgaaatatttccaaggcgacacaatacaaactccgatgggtactgtatgctccaaagccactggtctggagctcgcaggaagccagatgttcctgggggtggtggttgggcctaaggagcatgagttccccatttgtcttctgacaaatgtctgagcagaattcaggctgcaatggctttgtagatcctgcccattgtagcataattgcatgtgtttaaccatggggtatgtagaaaatatgtattctgaataggaaattttaactcctcatagtgacatcaccatcacaaagtaccacatttagggatataaaaaatagatgagtccatatgtccattgagtacagtctctatggctggtctcactttttcctttattctaaagtaaaggaaattgttctgacagcctcaaattaatgtccttgattacagtaaaatcaatatgtacctgcactcttaaaacccaactaagaagtccaaaatgtagggtaaatgcaaaggaaattaaaggagagggcatttatacattgtacagtggactaggaaaacggaagctaatttacatgtggcatttctaacctagtactgccaagaagcctaccatggattctagagctatctgtaaagtatagataaaaatagtacacatagctaagaaccaaactatcaagttaagccatgataaatgtggtcacctcatctgaagcctttattgtttagtctaaagccagaggattcttgatctcaaggaaaccaaagctgttggaaataaacctcacctatggattctcttaaggcattttgacccaacagttacattttatgttttcttatgcctgctattgcctctttatttgaaaatgctccaatagttagtgaacaatatgcttttagaacccagttttcatggcatccatttgctaagctattttaccttactctaagagagtctgggttaaaagttagacatttttatgcattgcatatttttcactccaaaagagcaatagtcctaaagatagcaacctcgtagtgactaatcagtatgagctcctattctttgtgttcatgaaggggcttcagagctcaaggtttacatggaaacaagatagaagtccatatattatttgattttcattatctaatatctgataatgatgtcagactggcattctctaatacttactgattgttgcaaagtcttctaacttacctaccctttgctttagagttcattccccttcatacagcccaacacctgtactaagaaccagataaaagatgtatcaaactatactataaattgtatgtaaagttgtttatacatggatccaatctataaagtaagactacaagaaaaaattctatatagcatgtaaaagtatcttttattcacctgatataattgtcttggtggcctactgcttaataagcttaactttttagtttttttctgaactctggattgttcaactcagatgttctgcatcccctctaagatgactgattcaatatggcttctcttggcttctgactgaattgctgtatctggcctcaaactaactctggtaatccgttcttgtgagagttggtgtatcctatctctgactcattctgtgaaatctttctctgattgctcactttgtctgccccttgattacagtttactttaaaatatggttgcttccttctacaaattgaccttgcctacattgtttgggattaaaggtttgtactaagggcatgtctgaattctagccagatcatcaggtggaaagaacagaggccaccagaacactccagtttcaccacactgtggagcataaatgttttctatttaaagttcctatgactgagatgggatttatcagtcctggaacactttattcaccacgtccccattcaatcatttagtaggtatcaagcacctgtcctgttgctggcactgttctgattactggcgataccgtaagaaattgaagacaccatccccaactcctgcccccaaaagcttaccttgtgataggagagaaaggcaacaattgagtaaacagaaaacatattttaaataattagatttatgaagaaaataatgaagtgtaagatagacagcagggataacctctagagaaaatgctatttggaatggtatgtaggaaaggtttcattgagaaagatacagttggaaagataatttaagtaatgagaagaagcttggcatatggcaatcaggggaaagagtattttaatcagaggaagcaaaaacaatttaaatattccaaagagagaaagaagaaatgcatagttcatataaagtgagagtgaccatgtatatggacagggactagatctcaaaggttatgccagagacttgacaagtagccatccatagttttgtgtttgtttgtttgtttgtttgtttgtttgttttacaggacttgtactctcctatatgggttaaaagatgtcttgttactctgtggagaattatcagataccaggatggggaggaagagtgatgaaaaactatcatggcagctcagggatgtgattggcaacagcagtgaaagggaatggggatgtcttgggatagtcatttgagagatggagacctccactaaggaaattcttccgtaagatctggctccaggcaagcctgtgggcattttcctagtttgtgattgatgtgggagcccccactacattgtgtgtggagcaagtagtagagagcaagccagtaatgagcacgcctccatggcctctcaacagctcctgcctccgggttcttgccctgcttgagttcctgtcctgacttcttttgatgaactgtgatttagaaacataaaacaaataaaccttttcctccccaggttgctttgctcatgatactttaccacagcaatcatgaccttacagtaaagagaagctagatcaattctgctaacttgctagtatatctagagaaagagaccacaagtgtaatgagtccaagatgttttacctaagccactggagaaataaaagtattagcattggggagttggaagctgtgggggctatggagttatgagcaaatttgggagaagaaaaatattgatttaattagggggcttgatgagtttgagattcttatacaaggaaagtgctattgtcagtagtatgcatgacacaggaacaacaatgagaggttagggcaggacatttaaaatatttttatttctctacttacatattttctttataaagctaacgcaagtaaggaatgagccctgagcaagttttaaaagataattatgcacatcctatatgattttaagtactaatttcagtcatttctctcttctttaaagtccctggtgtgtggaaagtgaaccagtaaaccaatgtgagtatttactcaagacacatagagttcctagtcacagtgaggtgtataaatgcagtcattgtctgcattcaagtatggggtagaggagaaaccctattatttgggggtgggggtatgttttaagtgaggaaatctgtgtaacatataataaaattgaagcttgaacttgagcccaatttctgaagtacagatgacttaaatgggtgggaagggacaggcaggacatccagggtaagagaagtcacaggaagatatacacagataaaatcttgctttctctttgtagctgagcaaggatgaaggagaccagcttagcaggaccagaatttgttttattgatttaggagagatgaatgaataatggctacctagagcttcgagtcacaacccacccatagttcctcctgagctcagtgtacttcactgaggtttgtggagctgagaatggagaggctgtatagcttggaagatcttggttataagcattggactgggctggaaatcttacttccccatagggagactgtttcagaagagtcctccttcataaatctgtgacattaagtagttactacttctacctgggttgcatatgctgtgttaagtagagcagtttcttcttgcagcagcagttcatcaagacttgctgaaattcctgagtgtcatgacacagctattgttcatatacccacctaatttttcatttactactaatatactttattcttatcctggcatattatttgggaacaactatgacctgtcatgtctccttcattttttctactttataatatcttgcaaatcatgtatgactggatatgagcacgtgggtaagagacactaaaagatggtaaccctttaaaggaagtataggtataagagagagcgtgattcatttactgcatggaattggactatatcgaactaacctcctcctgatgtctcaaaacctacaatatattatcatacaggtttggccctctgtgctttgttctctacaacatctacatgccatgagcagatatatcaatagtaatcaatctgtaaatcagagtaaacatgttgcgttgtgaacccatctaatataatatcatggcagtaagtaatactaggaagcctgaatttaaggcaaaagttaggaccaaacttttgaatcaacagcctcagaatctctagccaaattctgaacattcctcatccttaactaacagtacactggtaatttttctatgatggggtctatgattaacatcactcagctattaaagtcttatttatttgagggatagagtagctaagctacaacaactacatttccccaaaaacttgatgcttaagaatttgacactgtctttaaaaagttaggaggagaactcctacactagtgcagtttcttcatgccttgagaagaaaggcttggatagatttaacaatatttattaagcagtattttaccataaaattaatataccttaattatgggaaatttcaaaagaaataaaattcataattcctccaaccaggtatatttcctgctgattccagttttttagatatacttttcagatatttacatcaatggtatttgtggtaagtttgacccaaggagtggcactatttggaggtgtgtccttgttggagtaggtgcagccttgttggatgaagtgtgtcactgtgggctttaaaaccctcatcctaaacacataagtagatgctcacagtcagctattggatggagtacagggcccccaatggaggagctagagaaagtatccaaggagctaaagagatctgcaaccctgtaggtgcaacattatgaactaaccagtaccccggagctcttgactctagctgcatatgtatcaaaagatggcctagtcggccatcactggaaagagaggcccattggacacgcatactttatatgccccagtacaggggaatgccagggccaaaaaatgggaatgggtggatagggaagtgtggggggcgggggagggtatgggggacttttgggataacattctaaatgtaattgaggaaaatacgtaataataaaaaatattaaaaaaaaaaaaaccctcatcctagctacgtggaagctagtcttctagcagccttcagataaagatgtagaactctctgctcctcctgcaccatatctgcctggatgctgccatgctaagttgatgataatggattgaacctctgaacctataagccagaccccattatatgttgtccttataagagttgtcttggtcatggtgtctgttcacatcagtaaaaccctaactaagacaatatttaactgaggattatatattgatacaataattttctttttatatacttttagattttggtttttttttcatttgttttctttctggcactaagtagtatccaaatatttttagtatttgcacaccgtgccagtaaatggttatattatcatttatttaatcaacactctattgtcagataaagttttccattcttcacaatcctaagaaacatgataaacaaacttgcttccaaatttgtatgtagatttttgattacttcctttagaccatagatgtacactttctgggataacaacattcatatcctctaagtttttgacacatgttgctaagataacttgccagaacactgagccaatttcattctttctgtggtaatttcttaagaattccttctcgaggggatattaaaaccctgcagtttctcctctctgagcactgtctcttctgtggtcatagcaaacctacttcctcaagtgtcaggtttatacccagagcaaccagatcattcctacagtcatggatgctgcaattaagacaatgtaagtaaaataaactgacaacaagattactgtgggtttctttcaactgccagggctggacaagcgttgtccaccctggataagaaactagaaaaataaagaaaagcactttcacctcctatagtcaagccacatgcagagtgggaggcactgagccacaggtttatgtgataagagtcctgccctctgagaacccacaaccctatgtacagtgattcacaaggcataagatgaatttggacttccaggatgaagccatatggtaaaggtacttaaactgtattgtgcagactgcaggacacctgtgatctgtgtattcaggtggttggtaagaatgtcttgatattcatgggatctgggaaacgaagaactgtgaatatgcttatacgcaaaggattggacaggagcaaatggagacaagttataaactagaaatagccactgttgcttaaagagaaaaaccctacttgtttccatgtctcccactgtgtctggtccagggacatatgtgtaactcctaggatggaaggttcttcatttggtagcttagtgttgctgaggttttcaagtagcacagggaaagaacacaaagcgggtatacagagcattttcttgtgaggacaatgggagagtatttggaattgggcctcttgtgaaaaaatcagaaaggttgctaaggacctaggacctcctgcagtgttagagcagtgcagtgcagcttgtcactctgccaaggggtacaatggggaatgggagctgcctgactgagagttaaagaagtgagagggctcattctagtgcctgggccagaaaagctgtcttgaacatacttagccagctaaaagggccagagttcgtaggactcctgtagccatgactcaaaacttccagtagtccttctgaaaatgcataataaatgacacatagtgaacatgtaaacaagctatttaataacattttaatgcttgattctgatctcttaattaaaatgtgcataaaagaaaacagtggtggaacatctgtgtgtgttattgggatagcaggatttatattgcaccctgggctttttggttcatttctcagtgtatgtgattggagggggagggggagttgctatgaggcagttagccattgagtcccagagagtctgtttgcagccaccctctctgtgcagtgtctgtgtcttctgtttcctcacatgaagggctctggagcttgttctctgcctaaggtaaactgttttcatcactagacctgaaaactacccttcacccacccctctaacctgaaaccctgacctaaccctgactcagcctcattatctcaggagatatacacagcattacctaatgtttggagcctctgtgggtaatctcagagagttccgggaaaagcatagtcctttgtaactgtgaccttgtggtaattattactctcctggccactgtggaaatgtcagaatgtcagaagacagagatcctacccattcctgattgtggtttttttccataaccatcattgtcatcctcaccatccttcttgttattgatgttaagaatatatcagaacgtcattttgccccattgttaaatgaaagtaccagcaatcacaaagccaaaagagtttaaaataactcagatcttctacttaaaacttgacactatgaaatacttttgtttctatctttatttagattgtatctaataagcaagaagttaatctttcattaaaccaccacaaaatgttacttcacatctattattcccaagagagttctatgtcatttgttccataaaaagttttatccaaatgtccttcttaaatgcataatagttaatagtgccccacttcataagggcgacattatgccaggatagactttaacctaacagtcttacaaatgggcaactgttcattccacagctagttaaccagattcagagaggtttttataaatattgctagtccttagattcaaattcacatctagctttcattttcaaagcataatctacctatgattttaagcccttctgttaaaataaccgttattcttctgttgcaattgtagtcttggaggctaactgcctcagtctgctcacctaggcctagttctggaagcttctagcctctataaatctaatctagccctagaatgttttcagtctctgagacttactgcagaatacacgtatccctttttatttctttctgatttcccactggctggttctgctcagctgttctggttcaaactcctcttcaagctgactgattcaatctagcttcactcagtttcttactgaatttctttgcttagactaatattaactttggcaacctgttctaatcttctggctccttctcactctctgtctccttctctctctctctctctctctctctctctctctctctctctctctctctctctctctctctttctctctctctctctaacctgtctctgtacaactgtcccagtaaaactgccttctttctttttctctgcactgctctcttaagtagcttgtcttttctgtctcttcccataagagttggtcatagatattctgtcaaatctttcatagatattctgtcaaatctttctctgattcatcactttgtctgcctctcaattagatatcactttcaagcatggctgcttccctctacagactaactttacctttattgtttgggattaaagaagtacactaagagcatgtctgtattccggtcagaggattaaaggtgtgtgctaagggctgagcaactagaaacatcgttttcagtaaaaatataatcctggggttcatgatgtaatcaaatatcctgcaacaccctacagtgtagttggtctgtgttctttaggcatggattgtatgttctgaaggagtcaagtaaaatgtactatttgtgtcaaacatctaaaacttgtcttgaaaatcttgattaattcacaaatacaaagtaaatagcattatgacacatatgaagaacttcatgaataaattagtataacttccaagttttagcttatggatgtagtatgccccatggagtctcagtttatatatgacacctccctatataaagttttgtatcatcaaaaaatgtatgaaaaccctttgttttgggattcctcaaagctggcaatctctgatgatacttggagaaaattgcctacaatatacagacattacttcattttggtctgtccttagctcttgtgagtggggcacaatacaatttgggggaattaccttggcttttaattgagatttgctttagaagtgttcttccaaatgcagaaaggagtaggctgtggttcttcattcctttgcttttctctatcaccttgcacctctgttttctttctgggtcagtgctatcagtttcctatgattctttgatgaaagaggcactgagtcaacccctgctttcagcttattatgtctcctaaaacatttatcagatttatatgatcattaggctgtattggttagattgggttggcattgatatgataatcatatatataataggaagttatcttggtctactatgaaaatggggcccttgagaatcataagagctagccgggcgtggtggtgcacgcctttaatcccagcacttgggaggcagaggcaggcggattcctgagttcgaggccagcctggtctacagagtgagttccaggacagccagggctatacagagaagccctgtctccaaaacaaaaagaaaagagaatcataagagcttataagcctttctgactaccagcctgggtttgtttagatctgagtccaaggcttctacatttgcaaaatgaaaagtaaccataatacctagtttatagagaaattatatggattaaatgaactagtatgtgcaaaatgtttaaagcaatggtggttgcttatactttatgtgtatagaatggagatagatagagcgatagatagctcttccaggaacccaagttcagttcaaagcatccacgtcaggcagcttacaactccctataattcctgctcctggagatctaacattttcttctcacctccatggacacccacactcataagcacacaggtacacacatgtaaaagtaatttaaaataaaataaatcttaaaaagaaaaagagatggaaggggtagcagaaaaggataatgacttaaccgtgagctgagtttcatcttttcagttgagcacagcacacaggccgtttgctcaggaggcagtgctgaggttctgactacagctgactcttgacaactcccaactctctatggtacctcagtttgccctccctaaaatgggtgagaaggaatgcaggatttctatttctttttgtctacatggacttgatctcagagatatttctgctcaggatgaccagtgacatgacttaggacagtgttagttaaaggcgaacagccgagtgtggcaggcggcactgctcataagctgtgcttcccctaagtgactatatttgcatgtatgcttttgctctttgtaaatttgtcatgtgtttgagtatttatgcacctacatggccgctgaaggaagcacactagaatacattcttgtggtatgtgtgtttatatttaacacatatatatacagtatgtgtgtatatatataaatatatgtctgtgtgtatgagaaacagatgcactgtaggcagataaagcagataaatatagatccaaatagaagcataagcatataaatatagacgttatatagcgtgaaagctagcagatcagcaccatttcattactgcttcaagcttcataataaagagttgaaaatcagtgaactaacattgaaatttttgactgaatgacactgacagttcagaagacatggtgtaaggtaagaaaataacctttctttcaactctgaggcgaaattagcaggaagctttattacttttaattaattgatttgtgaaagtttttagatagtaggtagtgtggtatttttactggtacaaatatgccacttttcctaccatagaatcagaaataagtatgaagtaaaaacctactctaagtttgaaaggttcagcaggggtgacacctggacccttctgaccgcacccccaactttcccttgttcctggggtttggcaggtaggtaggctccatgctacagtattgttcccaggcacatctgaagtcttagaaaatgctcccaaaggaggtatttgaagcacaaggccagagtcaccattgctcagtgagagtggtggagatgcttgcagttgtgctcagtgatggtgctgtgagagttaaaatggcctccatctgttaccctggatcactatctattctcacaggcgaaagcatcgctcctgaggtttttgctgttttactttgtttttatgaggaggatggtgtgagctattttcagctggttcaagttaactgagtacttaactttttaatgtcacaagttatagcttggtcatgtgtttaaatatgattttaaaaattatctttccataaactatatctatttccctcgaggactgcatttcttccccagctttgttgcaaagcagttagaaaagctgaaatctgatgtcttctggacccgtgcagacacacagcccactttttccagtgtcacaaagcagtcctagtggttgttgctactgcattcctcagtgtttagtatacagtggctcttcctgatggggttggggcgcaggagagggaagaaggttccagctctctctgcttctcctaaatgaggagttagtgttccttccctcttgcttccaatctggtgtgagggagacacagtacagctgtgggggggagcagtgcagcctgcaagctgttcagtcgttacatctgttgtttgcacccactgtgtgataattccttatgtagcaatggttttacaagtattcttcttaaatatccaaaggtcttaaggacatgtgtaggtatgtgcacatgcatggacctgagacttcagaggggcctgggaacaataatgtagtatgtaacctacctacctacctgccaaaccccaggaataagggaaagtgtgggctacggtcaaaagggtccacgtgtcacccctgctgaacctttcaaacttaggctaggttttcttttcatacttatttctgattctttggtacaaaaaagtggtatatttgtactattagaaatgcccccccctctgtctctctctctcacacacacacacacacacacacacacacacatgtgcttgcacacacaggcacacacgtgcacacaaattcatgtaagctacagcctccaaattctacattgtgggaataaaatagaatataatttcaatttcatacattttttaaagaatgatttttattaataggtaaacataaactgtatagtgctttatactgcagtcctttaaaatgtttttcttggttgcatgataagctgtaatgttaccttaaatacgattatttgtaagaaaaacattggggctggagatacggttcagtggttaaaagcatatattgctcttccagaagacctgaactcagttattagtatgcacatctggcattacaaaacctctggcatccatgagtacctgcactcatgttcacatccctacacattaacacacatgtatacacaaactaaaaattgaaactaggagctggagagatggcctaggtgttagaacttactgttcttgatgaggacaaaagttcacatcaaagctcaccatttcctctaattctggggatgcaacagcttcttctgactctgtgtgttcctgcatgtgcattatgtgcataaacgcacacatacacatagtgaagaataaagaatctttaaagataaaaattacttaaaaatggaaaacatataaaataccatagccatataaaaagatgcagtaaagaccgaaaaggggagtcattattaaaataactacacatatgaccatactaaagcactatgtatgacctcttttgcttaataaatatattaagattagaattctaagggtaactatgggtatatagtctcttcttattttttcatttgttttcttttctcctggattaatatatgtaatgtgtatctttcattaattatttaacattaattgccacaaattttggcaagcagaaaaacaattgtgtacacatatgggaatgataacattgtactaatcatctgattttctatgcattatattttaaaaactcttatctagtataaaatcttaattgaaaattttaaagcaataaaaaccttgaggtgacttactgaatccgaggaaaaggcattccttctctaaggcactgaacatcttccaagtgtacatggtaggatggcatttgcttgaacatggagagacttcagaactgaggaaagcaagaacttacttttgagggaatcactcatgttacctcttaacttggagtttaagttggctttcttctttgacagggaagaaatttcatttagactgcttcatgttctgatgcaatatgatgtatgtgtatgtggggtatgaatcctaattcagggcttacttaacttttaaattacctttaatacactcttagatagaataataacaagtgtgtaattagattgcttgctaatcagtaagacactgcactgtaattcacagtaggctaatctaaaatgaaataacacaagtggacactgtgagatgtaaaatatactcagtgtattaattgctttgtcctacttcagtaagaaacaaccctgaccaaggcaacttgcagaagagtccataactgtgtggacatcatggacatgtggacatgtggcaggaacagcaagatgaaagctcagaacttgacacagaatgaagagagcaaactggtagtaggtgaggctgttgattggaagcccacatccagtggtagatgtacttcctccaacaaagccatatcacctgaatttcccaaaccctgataacagctgaagaaagcagtgctccaatgtctgaggctatgaaggacatttctcgttaaaccacgatacgcagtagagcctatttcttcagacctattgatttagtaactgctttttctctccatccttcaccaccacataactaaggagacaatgttatggataccagagcaaggaaacattttaattctcatctaattttcactctgagaggagttctaaagaaataatcaaaaattcttgtttcctgggattataatcacaaaaaaagagttagccaaaataagtaggagaccttcctacttacttacgtacgttcctgtttataccagtaaagtggaatgaagtgatatacattaagccttttctgttaataggcagccccttcctttattcttctcatgccagattagcatcctttattccaccctggctcctgcagatttaccttgttgattatgaactgctgttattagggaaacctgtgaggttgacgaccaatgccattgggacggatgaatagttgctgaatgttttcttttttaggtagtaagacaaaacataatatcccactgtaagatacttgaactgcatttcagcctagaattaatcattgtagctgaagtataaatcccgttagtgtcaggttcataatggaaacaatgacacaatcttaattacaggattctgccagccatacccttaatatccagagacttccttctggtgtccgagtttgcttttaaccttcttagtctgaatttactgcgtaactgaaatttcagtctgcatctttccaacttcgattggaattgagagcatttgacctgcatcattaagccgcattaagctactgggatttctctggatcctttcctgttgagccataactactcgcaaacatgcgcatctatgggatgaaaggaacataaagggaactgaaaggcaacctgctgttgtgggaaattagtagcctagagatcaagaaatgttgatctgactttggtgagatactttatgtggaccccaatgtccatattgaccattcagagatctagacagtggtagcatttaagagggaagcctgccagctgtagactacccttactgcttactgccctgtcacacttttaaaaatggtaagtatttgcctaagacttactgataatgtattattgaatttatagtttctcttatttatatttttctttataatttcaatatatatcaaagctttttaaccaaaaaaataataataacttccatatgaaaacaggaataaagagtgactaaacagaatggggggtgggggaatcttgaagtcaggagaaatccatcaggtagacacaggggacagtaagcaggtctactcaataatctaacatcttaagaacaggagtgagaagagaagtaacggtttcaacagtagactcacgtttaagataaaaaattaagtagaagatagctttgaggtgaacattttacataatgtaaggattttgtgttttataaaagaatcctttgaaattgatccctatggcatttaaaataagcttcaatttatacgctttgatttactctatgctgtggaaaaattaagagtgagctttagctaccagtcccagctttttctcaacgagtatgttcctcagaaaaattaatccccagccttcggatcttcatatataaaatgcaggagacaggcaagtgctcgtcttgttttaaaagccatgcagcctatgccattgatacactgctgagatgctccttgtgaaaatttgaacttatttacattaaaggaatggtcagatgcacacgcacatgcatgcacgcacgcacacacacaatgtcttttgatgatgtgtgcatgcagagttccagcactaacaagatggtaccccgtgctttggaagcatgaccaccattccacagcctacttttagttgaatctccaactggggttttggagaattgcagctgtaatttctttcctaaaggtctgattctccaattaactgcaagattgcatttctgtcttcctgatccagaatttatttttctcataaaactcctgtttaaccaagaaaatgaaaatcagtatattcttggttgcccttctgttaatttaaatttgcataacctaatcaaaactcaacctgctttgcccttcaacaaaaagctgtattctcttccgttactaagtggatacattcttctcagtatttttaaaagatgaattatgttgatatcccatgacttttcctttagaatgtgtccatgaaaattaaaatggacttgtctgtgcccaggagtgaattggaaacccaggctgaaaggacaggtaaaaaggggcacagcattttgctgatgttatcagcattataatttttctaaagcatttttttgtaataaaatggaactgaagtcaactgaccccaagctaactgcctcatggttcctttacatcattatttggcctgaaaataaatgatacagaaaaacagcctaagatttcatagaaaggattgaaatatgggatttgaggcttttctattttcttttcctacagaaatatttcttccataatcatttcacagtttcaccaaatatctggtaagcacaaagaagttgttggagtgtactaggcactaggtatagagctttgtgcgtattcttctgtgctcagcatctctgactaaaggttggagtaggtattcacttgatcatgtggaagagatgacaagaagatggtcagaaatgatccgtttcctcttttcctcagataactgtgatttcctagtttccacttcaaaacatttccaagatggaaataaggcccccacctagctttctattattattattattaatttattttatttgtttcatttcaaatgatataccccttcccagttacccctccacaaacttcatgccatttccttctcccctttgcctctgtgagggtgctcctccactcactcacccactcccacctcaccactctagcatgtccctatgctggagcatcaaacctccacgggactaagggcctcccctcccattgatgtcagataaggtcatcctctgctacatatctgtagccatggatccctccctgtatactatttgtgtttgatggtttagtctctgtaagctctgggtgttctggttagttgataatgttcttccagtggggttgcaataggaggttcagctccttcaatccctcccccagctcttccattggggtcccctggctcagtctaatggttggctatgagtgtctgcatctgtattggtcaggtgctagaaggacctctcagggaacagctaaaccaggttcctgccagcaagtgcttcttggcatcagtgatagtgtctgtacaggggatggatgtcatcccgtgcttaatcaagagaattcctctgtctttcttatcctagtagttgatctcagccttagaagagcccacaggtattggagagtcctgtacctacagggagagtaaaagtcatggacacttctgagtataaactttgggagctcattttctagcatggaaaacactaagcaatagttactaacagcagtgtccaacttaggtatgccagagttacatggtctacagacacacagtttaaggagttatttccatttcttctgcagctgatgtttgtgttcttcctcactttggttatttccttctaacttggggctgttcggctaaaccaaataccttgcaaagtaatatgtggctaaacaggaagtatctttgtcctaacaataccccatgcatcttagaaagaatttttgcagcaaggaaaactagtggggccatagcagtagttatcacaaacagagattcacaaatgggtctgcaagtgacaaattgctacaggcagagaagttttgtcagtttagtggaactgctttcagtaatttgaaacattagtactttgacacatggacctgccagtgaactgtgttagaaataagcttggaaaaccatgattactgtttggggcaccagcgcatacaccttgtcctatgaccttaacaatagctgaacgtcaggaccaaaggaaattaaaagcaaaagacaaaaaaggaccttatccctgctttagaattgcctctgcaagtgctttcctgttccctcctggccctctcctccctgtcatcccctttctctttttgttccctccccttctgttcttttctatttagtgtcctgaattcattaggtagcatagagtaaatcaatagtaaacgctaaccgcctactctgtactcagttacgcaatgtcgcataactggtacacagacagagagaaaaagcacacacagctttacatttgaaagctctcacataatttcacttttctacagccaaaaaggaagtaacagatgggaaaacttacagctttttccccctttcccagactgttcagaaaggagttagttaacatccctggccatttctagttaccctagcctgtagcaacatcccataattgtcagaaccataactggctttaaaacaggactttgtgactgtcagtgatgtaatggattttccaggtaatatgaaactaacatattctgagactagttcacttgttaatggaaaatcaaaaattctaagaataaaattaattataaagccagagataagaaagatgactgtgtgcacacgtgtttctacttgcaatatattctggtataatatttatgtgaaaacaacctggtataatatttatgtaagaacaattcaggaagatgattctcttcctttttacttcagttactatgagtttctgtccttctttttctcattacaaggcacagtcaaaggcagactcagtaacagcaaacatctcgatgctacaacaggacagaaggcttaattccaaggccttgtagaggtccttctctgaatggcagctctgtgtatgaatctagagcttgtgaattctcatcccctgcctccctccctagagccatgctgctctctgaaacacctttgcattcgctgcatcaagaactcttccctccccactcccctctccctgtcttctctcctctctgctctccagtcactctctctctactcccacctcctcacccctcctcctctgtaatctctcctctcctcctctctggtctctctcctttctctttgtagcgctgcacctctttcccatgcctctctccttcacattgaagggtgttagccaccctagatggaaacacagtgtggtatttgtatgtgctctatcagtctttcttccatcttaaaatattttgtttcacttaccccaaggagttctctgggaactaggcatttctgtctgataaggaggaggctggagagaagggtgtttgttttgttctttcattttactgtctggccaacaatgcatttgaagtggatataaaatgatacagagggcaacactggacactgcagagaactgttaaaccaactgggaagcagtggtagttctgtcggctttaaccaaatgaagggatggtgaaaggtgcgtggggaagtgaagaattggtctctactgtacaaatacaacctgttgaagaattgggctgcttatattttgaataagtatcttactttcagttcatgctttatttatggatgctaaaaccttgagatatctaccagtttaatatactaaaagtctaaggtatgtttttttttctttaatagtgtgtgtgtatgtatgtgtgtttaattcaaactatatcatattttaaacactttcttacaggtcagttattacaatttaaaaatcttttgtatggaaaactcaagcacacaaagataaaaatcaaagcaagtatatgttcgcctggcttctcaggtttcattgttaaagcacagatctctttattgtaacaatgctgtgattgcaattattggtattttggatatctgcattttcgattacatatgttttgttgttttaaaatgaatcatgactaaactagtaaatattttaaacaagaacacacacatatatacacatacatttctttccaactctttttcttctgtacagaagctgtatctcagagaattgcttatgaaaaactattgacatgaaaattggacacaacattctagtgtttagccaggaaattatattcacacatatttttctatatattcctctaagactattatggctgatcttgaattccaatatgcaataatgcatattggtacaatattatcaaatatatcaaccctcatctctatttgttgctgttggcagtagtgacagtaatgtttcaagtgccttagccagtgacttagctgtccaacaagaattacttaagttgtgcctgatacacagagcagctttataactattttctgtgttttggtaaaacagaaagtagattccttataatgcaatttttatataattggttatataacctgtaaccaagttattcttctgaacatacacaggaatttattctgaataccctaattttcaaataatacttttaaactgaaaaactaaaacccataaagggagtcaatatttgtagggaatcaaaaacagttgtagacatctggtcatggaagaagcagaaggaaaaatctaacatcttcttccctccttcagtcagataccttcgctttctagcttggtgggttttcacactgaaccacaggtacgcaggattgcattttaaagttcactttactgaaagcaagtctgctcagcccttcctgtcagctgtgaccacagcacgtggaaacatctaggctatatgtactttttcatttacagtgcaggactcaagtagaggcaaggctggcaaacttcaacttgctccagctgggccatgcaaagcagaagagttttaatttttttctgatatttgttaagtcctgcacaacccttacaactccatttctcttttcattgttcaatacattctaatttttgaacaaggtcctcagtcacagacagctttccagacagaaacacttacctgcttgtgccttgtatgaagtagcagcttcataaatatttgttttggtatgctggggagactcactggccgtcccagaacactgtccaggcaagtgtacaccatgcaaagaaagggacagaagaaactggaaatggagcgtctcagatctagcaatggagacatcatcctctttaatatggaagagcttattgtctactattactctgtgttgctgctgtgatctaaccaaccgagctaccttggatagttgctctcattctttataaaaacttcaaatctcagaagtcagttttacatctttcctagagattcttttcagtggtgattgctccagaggctcattttaaaaacatagtttttggcaagccacctgaatgatcttcattaaatttcatatgcatgtgggtgagatattggctctcaaatacacatctcttgagctctaccacagacttccttgaatttgggcttttcttatattctctggataattaattttgttttcattcatatatgtagaacctttcctataaaatgactctgtcatgtacagtttcattatttgtggcatggtaaacttcaggcctttctgagtcatgtttggagtaatttagttatatttgatcttctatagattgtcattgtggtgctggtattgaaggttgggtgactaccaggaaagccacttgtagcttctgtattcttaaggtaattaataagaaatacaatgtagaaatattaataggtgtgtactatcggactagcagtttctaaactgtagattatctaacaattggagcttgtttgttccacatttgaaaatattttaatgttaatttttatttcaatctattattttgtgacatagcataaaagttttaaaggtttcagttcacatttgtgcttctcttacctagcttggaatataaaaccatacattaatttgtagtcaaaaaggatagtataagtcgggcggtagtggcggatgcctttactacccgtacttaggaggcagaggcaggcagatttctgagttccaggccagcctggtctacagagtgagttccaggacagccagggctacccagagaaaccctgtctcgaacaaaaaacaacaacaacaacaacaaaacaaacagagaaggacagtccagccagtactctgatgaagtgtcatgaaagctggcgtacactgtccattgcttgctttgccatcactgtcacaagactgaacatcccgaacatggttagcaaacagcccaaagcaaggagagaccagtttgcttatatttataaaatgtttaatgaaaagtacagtaaaattcaaacagaactacaaatccttgtagtgaccaaaagtttgattattttttaagcagatcacaataattaactatgaaactgaactttctctacacagagtgtattgtataaagggttagcagatcatttattactggctgcatctggttagtgatcatcaagttaaatattcaggcactcaccaagtcaccagtcagtagggtctaattgtgatttcattcccaaaggaaccgtcttttactttctacgatcaagccagggtcccaggggagggacaagtgtattcttttctgtgattagcatattgtcatatattaggtgaaacacataccaagacttatggtatccttttccatttcagactcttttatcatcagcaattgaatatttcacacaacttgctggctggtaagtaagatttcattgtctctcaattgcaggccagaattttgaagtccaaagaaataaagtgtattcatatcaagtttagcaactccagacaaacaagaagtaaatctaggggctgtagtgaatttaccaccacaagattaaatttgaacagaatgtattttgatactgataagatataaaagaataagaatcaatatcacaatattggtaaacattttgaatgactttagtagacatggggggaaaaactaaaggacttgtttggaggtctttctggaaataaatttttctatagagacagaaacagaataaggtgaagatagcgcctgatgctccctgtggagaatgcagtcattttgacattaggaaaacacacaggaagtctttcaaacatactttttgtctctttgaatttctggtttatattatataatcttttgtaaatctgaaatgtatttgcctcttttgaatcttaaaaacagacatagccacacttgcatatatccccaagaagaaaagggagcggcctgtggagctacagataaacatgtctgttactggaaattaatagtgccaagataatgcaaacacaggtttagagtttggctgcttgtcttctggtgagactatgtgaagtttctagaagggtagtgtagcattgtgtccttgaacagtcttggtagtaggtgcctggaggagagcaaggcaggatgggaaggtaggagacagccagaaagagctgagtttgctagaggctggcaggctgtaaactgtaatgacaaatgtgctccagagggagggggagggaaggaacacctcgcttggcttctggctctcttctgcctggcactctagtcctgtttagtcataaacagcagagtcatccaaacctttaaagttacactcttgactgcacttcatatgaatgtgcagtaaatgaagaaaatcatctcttagggtgagacagagctttctgtggggaatttccatgctccctgcacatgatccatagttgtcaccgttactgtttctaattctgtcaccactctatctctgtccctgagcgtgtcctgcttgccaccgaaggccatggctttaggactgttattctttctcccgtccccagccccgactccctgctttacttgttttgctacccaaggtaaacctgctctgagtgggagcccagaggcacaatgaacaggcctacttggtaactttaacttgttctctcttagcattactcacaaaatgatatcagcacagaaaagccacaattccacactatggctgacttgcaaaagaagcagattcctccccagtgttttctgtttctgtgatcagatgaagtataagttgatgggcttggcctttgggtgtatccgctttcaggcacgaagatacagggcggagggaaggagtgggcagtgctgtgtgcttgcatttctctgttttagtacatggaaaccttctagaggagggagcacatcttgtctagtaatgaacaattatttatttcatttaaaaatgatacttgttcattaaaaataatttggaaaaatacataggagtaaaatgaagaaaaattaaaataattatatctataatttaaatctaaccattaatacctatttgatacattttctaactctcattttcttctgaggacatagttttcgaatatgctgtgcttggaattcctctgtaatttttttgttccttttttaaaaatttaacttaagaatttttcatttagttacaaagtctttatagacattctaaataaataaattctattcctataatcaaaatgcccacaaaagcattatattttactttttccatttctatagtcccttgcatatgaacaatgtgtgaatcagtctgtaaataatggataaatgattgaaagttcaaatgaagtatatattttaagatgatttttcaaaattttcaaatccatgaatgtaggcagattacggtaatgaactcctgtgcattcatcatctggctcattcactgcttaacctgtggcctgtcagtttcccactgtattgccttgttattttgaaaaactcagatatcatgacagttaattaattagccaatatttctggttcattaggatgcttttacatgttgatgtttttaaaagtttcagaaaagcaattctcatcattatatggaacactgtttctcttcttcgtgtcttggcctcatgtcttctcatatgtagcaactgactggaaatatctcagcagcttgtgccatagcaccctcaggcacatgtgctagccaaaggacagtggggttggagaagagaccactctaacgttagataggcttctgagacaaacggttttctttgggatctttttgcttaactcaattttaggatgataacttgcacagcagacttatacagtatcacttatctttatcattgaacatatcaatgtattatatgcaattgttcatctgaagtaaaagaaaaagttcatcctccgaccacgtagaactctaaactgctttaagccattactatatagagcaaagcaaagtacttaaacctaacttagtgctccgttcaaatgtgtatagattttaaggcttttttgataacaggaaagcacctggtagttacatgggactcttaaatctgaaaaggggaacattatataattttatacatacagctttatatccaaggagaggaaataatccgctgcacatcactgcctgtgtttattactctggttgtcccaaggtctccagagaaacatctacaagccacttttccatagatagaacacaagtttcacaaaagagctctatacattctgaatgatgtgttgaattgggatttgtgtacagtacctgtttgcaagttttcctttcttacttactaaattttaagccagagactgttcagtggtgatgtgttagccaacaggtgttttgaactcatcagatattcaggatgtgagcaagtacacactgcatccatagaaactgaatttatgtgttactttggcctgtttaatctttggtgcagtttccattggcctcgaaagtgagtggctggaatattgatgtgcctaacccttcgagaagatataaaaaatttctccaccacactaaatctctagaaaaaatatgatggcttacagaatggacacatacaaaatattttcagccaaagctggtaggaaaagcacacggggaaaaaagaaagtaataacacaagcaataaactatccaatcaaacagagcatctgtagaaactgctcctgtgcatgtgtaaacaatacaaattcttttcctgtttctatctcttctctttccatctgtcttctgaacatttattttcctctactatggtttgacatcaccaccattaaaatatcagctaaagagctgaagtgtgccctggtgccatggaattcaggcaggtatgacaaagcagtaacaagcaattgtactattttaaagttgcaaagtatccatatcttatagcaactcactttcctgtcgttattttaacatggatactaacagcaccttatggtcatttatttacatcttttccttacatgtgatggtgtactatgttcctgtcataaacatgaactgtaaagtacatttctttgacagagaaaccatgattctttcttgtttgtgtattataccatgtactcaagttatccaccaaaacttcatcatgattgcagttatagtaataattatcaataatagtgatagtattttcttctagaaagagtagctgaagccatctcagaagtaactgtgactcccaacagatcagtaggctcatcacctgagcctgataaaagttctgtttgaaaaacgccttgaaaaatagctcctgtttcttccttatgtgtggcttcttgggtcactgttgtatttgtgaccttatgtgtaacactaagaataaagtagcaatccactttctacctctttctctgaactaagctcatgattatagttgaatgactctccttattttgatgcaagggatcctttgtaaatgcatgacaggatttttaagcctaaagatgctgataatcatagccaaaggaggtagaaggttttatttagattgccgagcctctctattccatgaaactggcatattttctgggaagtttttattaaacatatattatgcaattgtggacaagaggataaaaattatgttattccttccccaagataactcctgtgattctctgtcacatgggaggagagaggaatgaaatccatgctaaagcagatatttaaagagattcttatatcctcatcacagtcctttcacatcgggatgctgaggaggaatccccattcttccctttgactagactacagtttgaacgggagatggttgagaaatggctatccatctggagattgctccagaggcccctctagactcccatgagaactgcttctatgagttctgaccttcattgtagaaatatttctgattttttgatgatatatgccaacagcttgttttctgggtatttgatagccactctgaattcatctaatgttttttgtagcatggagatcttgtaacctttcaatcctaagagtaaggactcttggaattaattatttaaagacttttagcccttaactatttttctttctttgtccacaaacaagttgattggttaatcatgtcctttgtttgtttttgttgttgttgtagatactgcacataaagcaaggatgagggaaagctgtttataaaagataattacaatggcagcattgcactttctctagattgtctcattctcttgattgcatcaagacctagactctagaaagtgtatttcagttttactaggaaaatgatagagagaaataattccgtatttatcatatattatcaaatacagcatgttaatatccttacaattacaaatatcacagttctttcaaaccctcttctattagcatgacttcagtatctggttagtcctcacacaaagtgcccagaatctaggacaaaacaccagatacttttcaagtccttggagaacagttttttaatcacaatatgataggtctgtggtctgttagagctgaatttatttctgagatgacttatcctaccctcccttgaataaaaattcacagtttcctcacaattaaatcaaaactcaaaggccaaagggatctctaagattgtctccaagtcatccttttgataaatttgtattgatttatttgttagtatttcaatgaaggttttgttagagaaatgtgaatcattttcttttgttccaattcattttatatattaaatacgattttattcattgcagcatataaataaaaaaaaattccacctccagatgcactgctctttatgaccctgtgcatctcaggtttagtgctttgcaggactctgcttgtcaacaggtgatcttgcctttgtctttcctcagagttctgcctctggtgcctgtcaccagcagtcaaataaggacagttttaccattccttcacgctgctctaggtttttttttctttttttactgccggtacatgaatttgttattctttgtaattccctttgaagttggaaatccaaggggaatctaaaaccgaccagatgtttctgctgctggagagggaagagagtcaggattaagtttaacaaaaacttggtctctaggaaaaaaaaatcatttcagctgaaaatcatctttaaatgcattcatttgctatatctctgttagttaatttacatttactagcccttttgtaggcaggatcacctatcaatttgctcagagtagaattcataagttttgtgagcaaacagattcctgtgctttgagcaaagctgtttcctttatggagtttcagctccatcagtcaggatatcccctgctcatgccttactgtgaggcctttctgtcgttgctgctgattcttctaaaggatcaccattatgtcacatcacattgggtgggtcagttctgcagactgtcacagtggcagaggccagggaagcctgactttggggacggaaggaaagaaaacctgcttaaatggctagcctttgtatggcccatcatcctttttaaagctatggtaattaagagtaggtgatgagacctttggctaaaatagccagaagttttgtggtcttttaaggagcaagttgatttcacaggtagtatgaataaacaaggtgggaaatgaaaaaagtgatagtctctggatatagtaatgtacaaagaaagtagggtcgttgtgacatggcattttggggtcctcactacaggtactcaaaactaccagaacctgtccattgcaaaggagggaactagtaagtaacaaaattagacacgaatatgaaaaactaatctgaatatctcaggggtttgtttcatatgtcacaaggcattggatagaggtcctgggtgtcatttgctgggctacagcaaagaattcctcctgctatcctctcatgtgctctctcaattcccaagactgcccagggttcccaggatgtagagaaatcagagcaagggctcagcatccttacctgctacctgggttaggcctttggaactggtttctgcatctcacgggggtggatgataactaggccctcagttccatttattccattgcagcttgctcttaagcaggaaacaccagtcctcagtaattatagtaagtttcttaagtcacaaaatcgggtggatatacctttgtaggcattctttttcagcctgtagagagataggagagggaaaagccagagagaaatcacttagcagctgattcgcttgttttaagcagctttcgcattttaaatataaaatattcagttcctggaacatggggtaatttaaatgttctgtaagaatttagagaaatccctctctctctctctctctctctctccctctccctctccctccctccctccctccctccctctctctctctctgctcttatttttcttacccatttgttctgtattcagggacctggattttcaatatagctcttcaaaactaggttgaaatacagagttttcaacctaaacagtttctcttcttcctcctttttactaatgtatttattatcgctattactattcttcttggtcaaagcagatggtatgaaaagcatttctgttggtctcactgctgacagagcctaacctaataatccaacacttagaacttaggcctcaataaaggaaacactgtttgaggtatttttccattcaaaccagcatcaaaagtttttaattaacaccatcagaaattaatgggctgaatgcaggagaaggtttctccataccccactactgggaacagcagcgagtgggatccattgtgtatgtttgtagtttatggtgtagttttatttatttgctgaagccgagtcccagctgcacactggctgccaagcctcaagagtaaaacctgcagaggctgcttcccagagcagtttcattttgctcgctgattattgtcctgagttctttgtgattgtaattggttagaaagtttgaaattagcaagtccttgtcagccatgaaagctttgaaatcacaaggcttgatacagctatcaagcccgctgaagcctaatggctttccagggaagagccttcagagtggttaacattctcagccccacaggctggactccagtcaccattcaccaccctctggagggccctgtctcagatcagggctttgtctggggccttttcttttccattggtgaagcctgtttcaggatgaacagattttagaataataggggcaggaggccttaggaaatgcgagcaaatgggtagaatgaagtaggtaagggaacaaggagaaagggggaaaaaagaaaatgcacaagagaaaagacaggatataagatgaaaagagctttgtaaatagtaacatttcatttctttgcaactgagtttaatgtctcagggtggaaaatgctggtgggtgggttctattttgaaactttttttaagagttgcccactcattgtcaaagaaaagccacatatgtctgtgtaaagggctgtaacctgcccagcatgccctgctgtagttttgcagattaagggcacaatcctttcctttatacatcaaaacacaggaatgtttgctttatcaactattctaaaatacaaagtatttattattaaaccttatgtgagcctccaacccagtatgttccagaaaagtcctctgctgcctggtcagttgtggaataaactgaatcccgccttatagagctgcttgggcagggtgatctggagcagacatcatcagcgttgataaatctgttctagaagcttacagatctcaataacttcctataaagcactcatttatgtctaaacccttcaagcttaatacatttagatataacccttaaactttcaattgtcttccactttaataaaaccttataaaaatattaactaaaaagcatattgccatgaattcaaaatgtcaggaaatctttcagtacatcttggcaagataatataaaataccactattctttttcttattttccaaaatttgttctcacatttttctcacaagcacagaaggatcaatacatatcatactataggataataataaaggaatgactctgacgaaaataatgagaactgtatttcttagctgaacagtttaggatttactccaaggtttgatatctttgaagaatttagacaaccccgtttggagtagagttgaatgtagatgattgtctgactttcccaagccgtatttatgagtgccagatcataatgtgagtgtattaatatgcctacattatttcccttgagaatttcatacagtgtattttgatatttatctccctctcctgacttcacccagatccttccccacccaacttcatagtctttccccctcccacttcctcttctcctcccttacccatctcctttctatgagtctagtttatgttgaggaattactcttgggcatgggacctgccctggaatggggttgatatactaggtatcactccactgaagaaaacaagttttcttttcccaggagcaatcagccacgaacagcagccacagctagggatgtatgttaagggggacttcctgcccacctcgtctccttcatgatagatttttgtcagtattgaccctgtgctgctcttgtgcatgcactcacagtttgtgagtttgtgcatttgcccagttgtgtctgaaaagaacactgttttcgtgaagtcagccttcaactctggctcctacaaactttccaccccttctgccacttggatccctgaagtttgaggggaaggctttgatatagacttcccatttagggctgagcattcagaagtctcttgttatctatgttaattcccatctgctgcaagaaaaggcttccttgatgaggagtaggggatgtgctaatccatgtgtaagtgattaggactcatttttattgttaatcatatttagaaaaacagtaattacttgtttactttcagggctacagtttcttgacattattgacagtgtccggtatgggtttcatctctttgagtgggccttcaatgtaacaagagtgattggtgacaccaataacatttgccccactatcacaccaatgtctcagcctgttttataggctagtatgtcatctttgtctgctattaatgccttggttcatttctaacttaagcagtccctgaagcaattctctttaagcctaggctcctagccgaagtgtacactagatactcttcctctgtatcttaatactttttttttattgctatgataaaaatgcactgagcgagtggctgctccaggaacaccaggggaaatgatgcctcaaaggctcatgtaggtttctttaaaacctcgctaatgtccagactcaagtaatagatctatggagcccaccagaaactatccactgttcggaggcgccttcttcgccatcctccctacaggggccattgatgtgagggacctccgaccggtgccagacaaccaagaagttttctgccatcctgtgaccgaccagagtctgatcatagaacttctggagctgcaggcccacggacagggtggagcggctgcacggtaccattttgaggacattggcgggtgcagggggctagggctgtgcacgtgctatctgtgcagcctctctggttggagaacttatccctgagaggctgctgtcaagatgcctggttcctttctggcaagcagcaggtagcaaaggatgtcacactgcatcaggccttactgtggctgcccccggaatcagacagatcttttgttcaccttcaatcagcccccgtgtcacagcaggtctcttggccctgaaaatctgtcatgtccaccttggagcctgagtaactttgagcagctggtaactagtttgactcttcatgatcccaacctctttggtccccagtaaagatcgttgaaacacaacgtgctactgaggactcggggaccctgttctgagagggggagtttctttctgcttcttccctggatgtaaacctaagacacctcctctgcagaaataaacttgctttatgaagaacaaaaatgcagtgagctaagacatttataaaggaagcatttaatttggctttggtttgagaggattagagtttaagatggaacagcagctctcatcttggtcgacaaccatgaggtggagcacagagaatggcatgagcctttggaaagagcaacgcccacccctaggcacatacctactctaacaaggccacgcctcctaaccttcacaaacagttccaccaactggggaccaattgatcctatagaggccattctcattcaaaccactacagccaagatattttgcaatgttagaagagattgatgagtctattctagacttattgaggatgaaacaactctgatgcaaaagaacatggaatagtacttaatgcttttttttaatgtgaactatgctagagacactgcatacaagtcttgacatttctagaataacttatcccatttagaccccagtggccttgctaaacctacctttactgtaacttcttcctcctcttctctgattcatcctcaagtcactcacccacccctgccttctgaaactaccatgcagattactacatatacagcaacccttgatcgagcccttgatctggcagatacacagacatgtatactcaagtttgttggtctgtttgtaactgttgattcacaactccttttctcctttctactacagccagtgacttattgccagttcttggtctgattgacaaagctagcttaaacccttatgttcacctctgtgtattatggcattataaatttctgaaggatatctatataaaacatggggctactgtacaaaagctatacttacatgcttgttttcttatatatcctagtaaatgaaagaatgtgtattttagtttatagcctagaaagtgtaattaactctgggtaaactaatagaaatgtgtgagaatctaaatattttttccatgtatcaggatgaagatggttgtcaatccagtcaattggtagtaatctcaatagtttctgccagtatttgaagtatcaaatcaatacagagggtttctgagcattgctgaaatttcatgaagcccggagaatgagagatggcaaagtcttggtatcttcaaacagaaatctaagattgaccccatctgattcaccacagggcagaatctactttcaggaggcactaaagaggcttggaatgcaaatggcaatacagtagaaagagtatcagggcgtggtgattgagataattattggtactaaatacatccttccagactgcatcaaagatggagaaaatgctccagaaatgggacctgccttcccagtggcttattttggtcccagattagtacagaaggacatgatgtggtatgttaactataccttttcatgaaaaacaagtttcacttttaacacagttactatgggaagataaaacattaacaattttagaattttgtcccctacaaaagtatgtaaagtctctgctcatttaatgtagcttaatatttcatcaatcaagtcaaattatttcactaaacttagtgccagcaggtagtgatgtgcaccagtcccacacatgatcacatcctctgctaagagtcacagtaaatcatatgatacacagataatgttctgcttcatagcgtgagcaaagaattagaggtgctgttacagcctactatgtttagtattggttgggctctgaaacatgtagcctgatgagaacgctgagaagcctgaagccatatagggactactcagtagaagctggcagcacattttcactctgtgcatcaccagccacctccatggctttcttcctggcttccctttgaatttctccattatggtaacaactgaaaagaaatagaggtcagaaaacacactaattaaaaatgaaagcattggtttctattcaagctccggcactaaataaggggaaaattacaatttctactgatcttgccctcaatattatcgtctctaaaataggaatgtgacctatcatagctactcgtttttactttttcatttgaaagtcattcatgggtatagattaaactacaagaggataattaaaatcactcaaaattgtccacaaataatctactttcaaatttgtggatactgttatactttttcctctgtatacacaccctttctggttttgttaaaaatctctgcatacctttatatagtagcttttttgtttacacctatagttaaataatactcaacattgagattaatataattacatcatttcctcctttttctcctggaaaaccctcccatgtttgctcactttcaaaatcatagccttctctttttaaattttggagatatatatatatattcttaaatttatatataatatatatatgtattcttcatgaatacaacctcctcagtctgcataacattacttttatatgtatgttttcaggtctgactctttggtatttgattacttcaatgtccttcactgagaacgactatttctcccactctcagtgttcctaagttgcccgtagttctatgcttggggctgagccctcttgagttttccccgtgatgttacaatatccagtcttgtcatcctagttcaactcctgttgaaacatccatgtgggtaagacttcacatgtgtaatttctgacatgggaagagacacagtatcccagcaaactctgggccttgggcttttactatctccacattcactcttttttaaaaatgtaaagtctaaagccttcaaagtgaactgtacattaaaactaaattgttgttatattactctgtcattataggatttgataagaaaaggctaagaagtagcatttagtgaaaggcggactttgtaccaacccatgtgtttggaacttcttttacacctttagctttaatagcttttcaccctaatgaggtgctaaagacagatatgcagctctgaggatgctagtctgtgaaatgcaactgcatagttgctgactagttttgtgattttgtgacactgtctctggctgagttttctaccaagaagtagtgaggattataatgatgctgtacacctgcaaagaactttttaaaagatccaaccaataagtacaagcaaaattttgattgcaatggtatgataaatattatctaatattttctatttttcagtgtctaatgccatactattctgatttaacccttctattaaaatactaatccacacagtttcaacttctttggtgaataagtgggttccaagaagaagcattgtgttataaatgcaaacctttaaggcctttagctttctaaatccttcttccctagctttccagtaatgtgaactccaggagatagtttatattcctgttcttggttatggttttctttagaatgagcaagtgctagctatatttgtgttttgatgggatttcaatgagaaaatacatttagaatctgttgttttgcctagacaataagtacctctgtaaatgctagtcatttatccctatcatttctatcaaataattttgtttgttttaaattgttagtatcagtgggcagattattcatgaattttataagcaccattcacagaataaggcaatcaaataaatacctagactctgtgtgttggcagcagtgctaggaggtgagctgcaacattctcaatgttctacagtttatcacagtgtcctgacatctctggcatcatttgtacttaggtagatgcaaaaatgtacccattgtttgatccaataacagtctttaccataaagtaagtttctctcttttttattgatttgatttgcaagattttatccaagttaagagaaaacattttctaaagcagcctatagttccttcaatgagcatacaaaattattaactgaatttaaaagtaaggcatgagtgtgagcaactccatactatccatctaacaattaccacacaatggttccgccattgtagcatttaaacattattacttagtcaaatacatcaagacacgatatttcttttctgttttttgtttttcaaactcagatgtaagtaagttcaaggccagtaccctaagactcataactgtctagactctttaaagatataacttagaaatgtaatgcttccatataaagcagaaagaaaggaatattgttaataatcaaggtgctatgggaaatcagcgaagatgggtagagtctccagtgagtgaaaagaagtggcctttcaaatacattttagcaaatgaatgggattctttacctctggagggggtgggagttgggggacacaaaatgacctctctggggtgaaggcaaatctgcgcaatacaagcaaatggcggggatccaatgcctgtgatggggaagggaggacttcagtggtgagcacctgggcagagtgggatttcataggagataaatgaaactgtgggcttcgagagcaaatccagagagtgggctgccctaaagatgctgtgtagaatcaaagggagtgatgtatcctagccaggcttccttgctgctatacccacttcagagtctagtggtggaaagctctggatgacttagatgaaattttcagtttcaccccaaaccatatcattttaaggttaagaggtattctgtctgaagcagagtacggaagttaaactctgtagggggaaaaattctgtggatttgaatccccagaattgcaaacttaaaatagtcatcacttttcaactatatcatttcttatctttaaaacagatcccttataaatttgtaaaataatagctgaacttgtgtttggagataggcctcttgttttgcagccttgaattcacagatacacacctgtctctgccttctaagtactgatagtaaaggcatatgccactatacccaacctgaactttttcttgattttattagaaagcctttaaaaatcattcagcacaaagattagagcaccaatcctgtcaagttggaagtacctcatgtcaagcccctgcgtgcttccacagcctgtgggtctgcagttctcaccaccactgttccctcgccagctacatcctgtttgtcaagccaagtttacgttttgcatggtctcattacttttctatactactgagcatataataaatgcatctttaataacaaggttttcgagatttctctttttctttctattgaaagtccttcctttctgaaattatcaactcaatacaccttactgtcacaggtaggcagtaaggatctcagtgtattttagcatcacagtaatatttcaggcttccaaaatgcctatctgaatcacttagtaagtcatagccccaaacaccccactcatgccgccaagatggaggcggaggagattctgcaatctgatggcttcctgggaagctgttgactgcagtggtgatggtcttctcctgccctgtttcttttcctaatatggtacatttggctctgtgaatcctacctgtgcatctttcaactctatttacaaaagaatggaagcagtttgctggcattagtctgtgatgccaaggctccagtgaaggttttttgttttgtttgtttgtttctctctttttttcttttcttttcttttcattcttcctttttctttttttttttttaggttgaatatgttcttgttttcttatttgttaatttgtaaagccaatccaaatgtgaagaaaaaaatcaaattttgccaatttgaaaagaacaaaaacatctaaaacctcctttaaaatttttctaagctattatgagattacagacaaaagattgtacatgaaagatttttttttttttttgaaaaaaaaaatcaggttgctttgcctttctttttcacttcaaaagtctttgtcagatataaaaaagaaacttactcaaaatgaagagtaaatataattaaaatggtcgcttgccttgtcatgtaagcttcttatgggcaaaatctggataaacttaacactatgaaacttgggcagaaaagaaaagagtgggcagggagagaagtttgatttttataaaaatgatattcaatctctaattgttttggatgagaacatttctcatgcattgttgtatttctcccatggtttgccagagacctggcagacagttgccttgtcctagggaactaatgaatgtatgacagaacaagcacacaggccactttagtgtgttgtaagcatgaattttctcataacaggaacaatttatagtgcaactattttaacctaaaggtataattgttattaaatactgacctcaaatgtatcgtttagcaggtagtacggggctgtgattaagccttcacattttggaacactttttagttgtgagcttaaattgccttttgtattaaggagtgattattaaagtccactaattggaaacttatggaggaaaattttataagataatgccataatgtagtttgtagtatttctggcacatattaagtaatatatccatttggcattgtgcatagtaaaaatgaatataagtattacacatggaatttttatacaaattaaatgaatatatgttattatatgtatgaacattcaagaaactgtacacaaggcaaaaaaaggattcattcgtattgattattctctctgaaaagaaacataatctactcgggggcaagaatatatgtattaataggttaaaatcaataataatgaagttcccatttattaatcattggcctcctgttgagctttaacattcactaccctgtttaacataagagctaaatgaaaagtctatcactattcagatacacagaaaggaattaaggcatggttgagttcagcactgctagtacctgagcttccccgatcctcctgcctagagagctggagctttaactactgtgctactaaaggaggctatggacaattgagttaagtgttcagtcatgaagaacaacatcacaaatggaccagctgggaaagaggttcagagaagtaaaaaagtctggtcttcagggaccaaaataccatacacctgaacacgattatgtatctactacctttctgcagtttcgattatcaggattcaaccaccatccaataatattgaattaaagttccataagtaaatgttcatacattttcggttccatgctattgtgagtagcttgatgaattctcctgagtcttactgtgtcctgccaagggtgcaaatcattcattttaacactgtacacactactgacctgtggatcacctaatagatgtctggattatcagacaaacttttgaagtatctcagctttttattcaaacaatcctcattttacataattatagccacaatgagtaaaattaatgatactaacaatttgaatatactataaataacttgcagtttccttaagttaaagggaaatgcttatcatagttatgtgtgtacatgaaaaaataaaacagtacattatccagagctaagtacattcagaggtgccagccaccctgtgtcctctaacccttcctgtatatgacacagtcaccataaccatcatggagaagagcccatctccctgggtttcaattctgattgtacaaattgactgtggtatcataagaaaacttctaattactatattttcaataaatggaaaaataatagtataacctaattgtgaagctataaaggctaaacaagttcacacacaggattaccatggtacttggcatgtctaagcattaaataaatacatattaaataaacattgcttgcttcttttttatgttataggtgatgggaatagtttgaaaaatgtcattcttggattgcatttttaaaatgtaaaaacaaacaaagtagaatttcacaagtctgggctattaaaacatttagagcattgtttttgttctttgtctcaagagctatacttcagttgaacatgatgagaaaggaaaagtctattgtatacgtaggtgaaagaaattcagaaaaaaagagtatgttgctagcctcttgtgattttccttccctttctgcatgtccattgatagttctggtaacttctttgagaagatagtaatgtcaagttttttaaagaatattgttcttttttacgtttctgaacaaataaatctacttcaatgtatagaaaggctttagaatactattggcgatgctaagacatagcttgtactgtaatgtgcagtctgttttgttaaaggtacagtaatgtacttagtaactaaatatgcagacacctccctgcacatgagaagagtaggataaaattcagtgacagggaactaaaggaactgttatgctgagctgtgccgttcagatgcttcagtcagtttttctgttctcatgagaacagctgatttggcaatacaagggcaaagaataccaaaatggctagaagaccaggcattggcagttccattggtgatatagtaggaatgaggatctatgtaggaatgatgagattttaaagtgcttgtaatacagttcatgggcagcacttagctggtcatggctgtctgctagtgacctcacagtagcaatttaacacatggccctttgcttatgtctatttcagaggctctttgaagtcaggcagttataccacaactatcattttttgatgttttgtttctgaatggatgtagttaaacacagatcacatttagactcttctgcaatgttctgtagcacgcatcccaagccaatattctataaatcaatggcatttcaagtttttactacttcatacaaagtcaatcttcactcagtctttcccattcttttaaatcctctcattcactctttcattgattgctctaccttacagacagatgaaagttgactttaagattttatgaggtaatttgatcttcattttttactttattttataatcccattcaccttggcttatacccactctttctgctgtatattgaaaattgtgagcccttgatgctaacagttaatgattcattctagagcaaggtgcaaaatgctcttgttttggttttgttggtggtagatatggttgactagttagcatgttggttagtaaattggtaattttgtgggtttttttttcctctgtttaaaaactttcaacctcacacttcatagatatatatagtttctctttatataccaaaactattttctgtgtgatatgtaaaacagagttaaagctcaaccaaggcctcaaagcctatttatcacaaagcagaactctttctgcctaatcattagagtgttctgagtgacgcctgaccaagagatcaaattagctaagccttgattctcggacattcccaagtgttcctacaaaaccttgtatagtctcttcttttctatgcctaataagagattcatgtttaatacagaaaacatctggctcaggtcctcaggttttggtaggaagatctccacgaaactgataaacatatgagacaaacagtgccagggctgtgcacagcgaaggtcccagaagcttcctcaccaaatatttttttgagagcagaggtatctcctggatatttaactttcttaaatgtaaatgtgggtacgcagcttattcttctctaatagatgttttagggtatgtacatggagagtcaagtttgctgcaaactcctggttcaaatattacctggaacttcataaaaccttatcagtattcttcacataggaaaaacattacccgcaataggaataaatttggaacatattctaaccaaagccaaagcatagttaagcattttaataatgctaaatttgagatgttgtacagatgagatattttccatacaaataaagaacaaagtgtataaaaccccaggacttgcgctgagttagaagcacaatgcagctgtcatttttgcatttcctgcttttcatgaaacattactagtgatcctctgtcatttaaatcagctgagactgtggatttatcttaattttcaccctttgtttcccctttttgtgatagcagttatgagatatgatgatgtaaagtgtttctgcttataaagggttcagccctgtcccttggcagactaaatcttctggctaattcactgatcagttaaatagtcgaagttattattattataattattattttacatttatatagcacttttctccaagggttttaaggcattttacacacagcaaattaccaaatagaaattaatccttatatcatcctgaggggtaggtacactcacattaatgaaattctacaaaagtccccttgtgtcacagctctaccccaatgcccagtgaacctgcccttcctttacaaaaataaaatagaatgcccatggcatttcagggaaagactaacaggagatcgttgggaaaacagtcctgtgtcctgactttggcattctgagcttcctggacaataaactattgggagcaaccagacatgtaggggtattgacagaggtcacccacctaggtagtttcatttaattcttcaaagaacaagttaggatgtgatcttaaaagtatttgattacatacaaaccacatgggagaacatttaaaatgagatcccaagactttctcactcacagagattcccatttaattgctacagaaagagcaaagagcggtgatttttgaagccagtggtactttgagaaatgtgtcatgactcaggaagaaatgttactacctaatgtatatatcagaaaatgatggcttaagtaagtaacatgtcacaatatttggcagagtcaagactagatgccaatttggcaaattcccaaatctgtactttttattattgtaatacttacagtacttccaggaaagggtaagtttagaaacaagtgtaacgaggagttgtagtctatgaactggcatagactggctcttgcgaacctcagattcatttggaagccgaggcctggagcaccatcagctgtcctgcagagctgacctgcactttgccatgtgcttctttgtctcagggctatcttgaaccctcaaagcagctgctccatcagctgactacaactcaggaaggacccaaaaattacagaatgttgaatcatttaccctgtccagggagtgtatcatctgcttaataggtgtcaccaggaaaaatttttaataaaactcttgttatgagatcagattggctttacttgttttgtaggcagacttactctgagaagggggagaggatataaagatttccactattatttaatattcaatttaggacaatttcattttttaatttcttgacttaatttttattattttttccttcaaagactggagcaagctatggtaagaggaagtacactcagacagtagatccagtgttctacttgcccagaagtttctgcattccatagtggagtttagagatgcttatggaatgaagttagacttttcagaaatgagaaacaccgagagtgtgataaggagtctcacagtccatataaacttgcttaaattcttttcattgggtactaaagtcaatcggattgacaggatttgttttttagtcaaaagcatgtatcacttagctatggataataattattgtcgtcctcgtgaattttttttagtctcactaacataccgtctattcctggaagttggtttctgcatctaaaattctcttctctgttggtgtatatggatatgttcatgtttgtgtgcaccagtgtgccagtgtgtgttcatgcatatgaagaacaggggtccccatcttgtgtcatagcttctgtagtagtcagagttctctagagtcacagaacttatgggtaggtagtatctatatagtaaaggaatttgttgttgacttacagtctgcagtccaacttccaacaatggtaggcacctgctgtgaatgcaagtccaaggatctagcagttgctcagtccatacagcaagcagtcgaggagagagagaatcttccttcttccaaagtccttatgtaggtctccagcagaaggtgtagcccagattaaaggtctgtaccaccagacctttaatcccaggtgaccttgatctcagagatctccctgtcttaatcttctagaattcatagccactatgcctcaagatctccataccaagatccaggtcagaaacttgtatctcccagcctctagattagggtcactggtgagccttccaattctggattgtagttcattccctatatagtcaagttgacaaccaggaatagccactacagcttccaaggcaggcactcctgtctccaccttcctagaactagggttacagacccgtttgtcttttttaaagaaataaagtaaaataaaacatgagcacttgagatgtgaactaagtcctcagggttgcactgtgcagtccttaacctgcaaaaaatatagtcctagaacccttctttttaaatactgtggctatactcagtcactgaaagaacaaactttatttagactttcataacccaggcagtgtagcaaagtagcatttctttattggcagaagcaggtaaccgtagcaaatgaagatgtattcagagacggtaaaccgcacgctccttaggacagtgcagtttgttccttggcttttcaggcttgctctcttcaatatcagtttattgtccagcgtggatcgagatttctctgtaactatatagactaccgctttaagaaaacagcataaaaactctgattacgaaattaagcacagagctttggaataagccaggcaagtgaagggccctggagtttaatcccttaaattcacagtcaatctacctctgaatatccccattttgggctttacaaaggtactcttagtaaatattactgtttcatataataacaagattagttaaggataatgtcctactttatgtgtgtagtctttaggctaaaaataacaaaacactgtaaaaataatgtgaacctacttaccaacaatttagcggattccatgtagtattcatctttgtttattcaggctaactccagcataataacggtcaataaataccattagaggagacagctctttatggagcctggtattttgagcagtacttgagacaataaaatacaggtcagcaagaaatgtcaacagttcctttaaattctttgtaatgggattacaactgtattgtagaactaataaagaaactagcatagattgggtttgtcccattgtctttctcagagttgtaaaagatataagagacacagatatttcacagcctttggcctctaccacccatttctacacttaattatttcatctcttcctattctagaacaagttataaacatttagatttttaaagagatctttcaaagtgccatggtactgttgctgctttctaattgtttgtttttcccgttagtttttcctgttaaccctctccctgtgacttactctaaaaataatatttagtggtggtctcctggtagaagacacttaacatttacaattgaaatgttaagagatctaaaactatttcctgtttctgtgatttaaaaaaaaagaagaagaaatatcaagccaccttaagagagaaagggctcatttatcaaagctttaggttataggtcatcactgtggcgaaattaaggcattaggaacatatagcagctagacacatacagagttaaaagcagaaagaaaatgaatgtatgcaggttcctgctgtgctagctttttttacttttatacagttcaggatcgcctacctagggaatagtgcctcccacagttggcaggtcttccctccaaattaaactcaattaaagtaatcaagataattcctacagacagcccaaaagccaaatgtggacagaccatcctgacactctcttcccaagggattctaagttgcatatatacattctctaacctaatcctctgatatagaacattctattaaatatatggagaatatattttggagtaccatgtaagaagtttaaatggaagtcaaaatggtaaataatattggcttctcaaaattactgagttttctttatcttctttattggctaagccagttgttttgtttctgttttctcatttattggtctctatagtgcccacctaagaagtaatttctcacagttctgggtaaaaagaaatcttcaggtcatcaatacagtttattgcgtgatgcaactaaccaacatgaaattcaaaagcagaaaagagaaaacctgtgcaagacagcatgtagccgtgagcaaacaatcacactgtagccgtgagcagatcctctctgaacactgatttcaggcagcctcttttatcagaaaacaggtgctcccttaacaagaaaaccctgaaggaagtgaaagggttacaattttagttttagcataataattgtaataatttgtatttcaagttttatttatttttgttcttccttgtctaagtgatcagcagtcttcaatggtattatagtgttgagttttatgtttccagagtagaaatagcttacttaaaaagtaattttttatgcctgtttagatcccatgctttctgtcttggctgaagatgactcttgtaagaaatggccagagacttgtagctttagaatattccttctccctgggagaggagtgagatttgagcaagtgtttgtgctgcatggagaaaatgctgtgcatatgtaaaaaaaaaaaaaaaaaaactgtcctaaaaaacagaattgtaacttcccataattcacatgggctaacattttagaaatgtactcattgctttttataaagtactttaaaatatctccataacagataatgttgcatagtctatgagttcagattttacattctcccttgaagaattcaaaacgggatattagcatgggtggctcagtaatataaaactgtctgtgtcatttggcataattagttaccaaaaactacttaaaaaataattccttagcgctgtgttctgtatttgtccacatctatatgtgaagacatgtttcctattagccacagctctcatttcagaccatccatcccattgactgtggaatttaaatgttcatgtggcttacagtttaaggccagtgacttttggagattgggtttatgccacagttctccacagtgctccaactaagattttggatcagaggtaaataggaattgtacacattgtaagacattaagcaacattctgatctctgctcactagattccagtaacactgtcagtgacagtcatcaaatttatctccagacattgccagttgtcatctgtaggagagagaaatggcaaaggacctttgagctgagagctcctaagtttgtaacatgtgctactgggatgaacgtactgtttgttgtaggaactcactttttttatttgttcatttataattgactagagataaaattttatatgaaccgatgaaagtcagtagtcctccactgagacagaggagtccttctctataactgtgataagttatacttttaagtatcaattacataggtgtgcttccgagtctcatttaatgactttcactagagaaatgagtctaggattcttcacagatgtatattttatactttttatttatttattggccttcttataattatgatctttctgaaaagcagaccaaactggcatgctgctattgacgtaacaactaaattccctgctcagcacttacctgtctcaaatatagtagcacctcccaaaagagacctagtaactagtgaaacaccaggtaaatccgtcttggctttgaggcaggaagatggcaattaagcaaatggagcttcagtgccctgatttcagtttctttgtctaccagtaaaaactggagattacttgccaaacaaagaaaaggaagcctgcttaactttttaattaagatacttagactccagaacttaacgaaggtggtgaaacttgttctacctcacaggagtcagatgctgtcatattcctgcagcaggaaactgcagtaattgttgactcagtagcttgctcagaacctctcactcctacctgcacctgggtgggccatgaaggcacctttcaaggacaatcccatgttcttgaagaacctgagatcagaagagtctgcttgagttctcttggagtttctgcacaagtgctcagaattctccatgcttggaccgtgtttcaataataaataaactaaaattcattgttttccttcataaatggtcaagtaacatttcaaaactcttaacagcaaaaagaattttctggacctataatgttatggttgaaataccttttgaatacaatcttgtaagcataagtgctaactaacaagcatcttgtttccaaataatatccactataacatttgtgccactttatgattatttataatttttaacattaataaaataatgtttcattcagttctttaatttcttgggtgaaggttatctgtagcagaattgaaacagaatggagtagacacttcggtaagtgtagtataataaaatccattttccccaatgttgtttcactttatccactgcagttaggctacattttggttcacatcagtattttgattcaatctactagttatattgatctaatgaaataataaagttatatatatattaacccatttttataaaagtttcattcacagatatttgtaataggaacctagacattttatattttgtacacatttcaagagacatgattgtagcttagaaggaaattctagtgtatctataaaagactaaatagcttcatttaacttttatatacttcatatgtaagctaaaatgtcaaaggaacagtcatttttctgctattttttgaactatctgtccagagatatttaattttaatttttttgttcacaagaaataatttggtggtatcattcttagcaaagcctttttctgagggattttcactcataaaatggatcaagggaaagaaacacactttcccacctgtctatttctaagaacccagtgtaaattctcagaggataacagtttgccatgcatagtgttcagtgtcccttcaatgcctactctttccttgcagtaaagaaatagtccttctctcatttaagacatttccatcaacttaccaagccctcatgttatgaaatcacagaattgcagatgctctgtgcccagattttgaactgagttcttcaaaactgaaccagttgccaagtaagaaagaggttgtaacgcctttcatcgtttacccgagtatttgtaagtaaggaggctttgtttctttctgtctacatacaaaaagaaattgctgatattcactgtgtcctggtgaaatgccatattcagaagctacttaaaggcagaaggtttaatgtatatgttgttgtattgccattgaaataacgtggtttataatatttctgtgggcacaaagaaatcaaagcatttcttaattgtgtaaagcacactgcactttatcaagatagtgtatttgacacagcagacttgcctgcttaggcggtacttctgccatgatttaggcctatacatcctgttggctcctccctgaaaatatagaggtagagaaaggagaatcaagacaaacggatagggaaggagataggtttaggatataatgtgtgatccagggaggtgacctccagggaaaaccagaggctatgacaagcaacagtgacataacagtgcttccatgatccagaccaagcttaccaaactcatacagctggaagaggcaatcaggaaactgagctgggtggataaaggagtgtcgactcaaagtcacagattcactggtccataagctcagaaggtgaacacccaaagtcacaggtttgctcagagcatgaaagaaattatgcttgttttgaaagtcccaggacaggatattactaacaaatgtcaatataacatcagctaggtaacattaacaatcatgcctgcattctgccttataatgagttataatgaattgttatgatagtacaaaatagcctgttctctactaacctcttagattcagcttgaactctctaatgattgttctgtgtaagagaccctgggctgttaatgtttcaggagcaaggttactgttgctgtttttagcacaagtacaaagggctttgtatgtatatataaaactataactgttgtttatattattttccctaaggaagactaacatttaaatgcctttatgcatacaaactggtggccttcaattccatgttgtacttaaggccccaagtgtagttttcatgactcttaacattttggtgttttgccttgaaacctcatccttacaggaaacatgaccaaacactgtatccacaccaggttagctttctcctagctagagacatttgatcccccaccccaatgtgtgtgtatttatcccccccacacgtgtgtgtaattcccgatgcgctccttgcaccaggcaattcttgcatttagtcagcaaaatgtggtgagtgttcctccttgtaaagcttgctgtgagaacctgcagtggaccagtaacttctcagggtgttggaaagatttgtcccatgactcactacagggacattggtctttctctgtatcctctactgtctacccttcccttgctctgagttttttttattttaataagatatcacaaaaaaaaaaagaagaatactatggccacccaggttttcttgcttttattcttctccatcatatatttgaagcaactatgaaatgactgagaaagatgacaatttattttgacttaatagttgatctggacttatgtgtatgtgagtgtgtgtttgtgttcagtagagtgagtaacagatctgtgatatgtgtccgctaaggatctacttccaacactgttttaagaattgtgtacaaacatgtttctgtttgtgctaaggctttccttgggttacatttgttataatgatggtgcagaggactgaatgatatagtcgttaactgcattttcctccttagggttaatgtattccttgattcttagatccttcattaccaccattaatcctcatgttctatctaaaacatagggagagttttctcattttccctttaattatcgtttcaggagggtcactttaccagcacatccacaaactaaatagtggctcaaagtctcagactgttcgggtgtcgtgacgagaatatgtagcctcagggaactgctgtgatgctcagattgtctaaatacaagttcacaagtcccaggaacatttactgtaaagttagaaggaactctaaaatcactaaattactgttaagtgtcaggaatgagccactttattttctgaaaactggcattttttaagtaactatctgatacttaagatggtgtaatatcacatagccacgcagtacccatggagtctgtttctaatagctagaggcctgtgatgagtagagtacaatttaggcagcatcagtaaagaaaacttgtccatagtatgagagcagcattggcctctgcagggtttgataggctgctctgttgctgctcttcctgtttcagattcacattataagcaggctttgtttactcacaaattcatgtcatggccccaagcagcacatggttctagagcgaggcaggatggattaatgttaggtttatatatatgctgggaccctaaaggagtgactgtattacctggcagcttaacaagcagtcaggtgcttagagataaaaggccaaacgccagggagataagaatgcctggcccaaatggcatacctaaaaagtcagcttcctttgaagggagattaggcaaaagccagttaaaaataaggagtgaaggagcaaacttgtgagctaaagtgtgttgacatggcatctggcttagttttgacaaagctttgactaaatgtgtgggcaatgggattcgcatcccccaaatcgcatgtttttgtgtatatgtaagccgagcagagatcacaggaaggaacattttcctccctcattactagtccttcctttccgccttcttttctttcnnnnnnnnnnnnnnnnnnnnnnnnnnnnnnnnnnnnnnnnnnnnnnnnnnnnnnnnnnnnnnnnnnnnnnnnnnnnnnnnnnnnnnnnnnnnnnnnnnnnnnnnnnnnnnnnnnnnnnnnnnnnnnnnnnnnnnnnnnnnnnnnnnnnnnnnnnnnnnnnnnnnnnnnnnnnnnnnnnnnnnnnnnnnnnnnnnnnnnnnnnnnnnnnnnnnnnnnnnnnnnnnnnnnnnnnnnnnnnnnnnnnnnnnnnnnnnnnnnnnnnnnnnnnnnnnnnnnnnnnnnnnnnnnnnnnnnnnnnnnnnnnnnnnnnnnnnnnnnnnnnnnnnnnnnnnnnnnnnnnnnnnnnnnnnnnnnnnnnnnnnnnnnnnnnnnnnnnnnnnnnnnnnnnnnnnnnnnnnnnnnnnnnnnnnnnnnnnnnnnnnnnnnnnnnnnnnnnnnnnnnnnnnnnnnnnnnnnnnnnnnnnnnnnnnnnnnnnnnnnnnnnnnnnnnnnnnnnnnnnnnnnnnnnnnnnnnnnnnnnnnnnnnnnnnnnnnnnnnnnnnnnnnnnnnnnnnnnnnnnnnnnnnnnnnnnnnnnnnnnnnnnnnncccccctctctccccctcttccccttgcctcctcgccccctctcctctctccccctctccctctcgttttcccacctctctcctcctattattttatgtattcccatgtttttcctccaaaattctcttgcagttaagtagaaagacccccttccctccatcgtctctcatcctatatattatatatgtccttgttttctctaaaattgtctctatcctatgcagttagatagaggaaaccactgaagtcactcttctccctgttctcttcaggatgcaaggtttgattttaagttgtatagctgtgttgttgtgctgattcgaacctattttttttttgaaagggctattatccaaagggtggttgtaaagcaatattatggaaggtcacttggcatttttttttcttgagtctgtttttctaaaaccaggcaattactctatcatttaataaaccttgcctcagagttcacttgaaagaaagctcataagatttaaaggggaaaaaaaatccctaaaaataaaagttaggctaggctaggccagggtgggaaattccattgtggctagaagcccatggcaggtagagtggaatttaatgaaggaaactgctgtgtttttgtgtctttctgtatgtttttcctttaaaaccaagagctgggcaggcatcccattcgacctgacgtgacccaagcaaattgcttcttatataaaaacaactgcagactttgagaatgtgaaaatgcactgtatccttctccaactgagagaaacgaaagcctgagaaacaggacggccctgtcaatactcatggagcagagctatcactcaagcctgataaaggagattagaacaggctccggtgccagagggatacacacaagtcgggttctttcgttctttctttcttttctgttttttattttcttaaataagaaagggcagtggatggaaaacattttttagagacaagttttctgtataagaaggtagtaatgtgcacagtatcttaaagcttttgtgtggaactgggttttaaattttgttttaaactagtattttacaagaagacaaagagaagtgtttcccttttccaccagtcttaggcaagcaccgaagaggagttccgggtgtgcccactgatactgcattcagacgtgttgccttggcttgtgtactgacagatttatttaaaaaccaaagtttaaaaaatgcattgtgtgctcgtgaagtctcttcataaatcttttcctttatgaattattttgatcacaaagctgcttgtttaaatcgctgaaggactattctccataaaagagaatgccttcattttcaaaccttcagttcagaagccagcaacttcccctgaacagcatgcagggatccagaggctagaggagagggggccgcagatgtccagactctgacataagtcataattcaattcagagttgctgcggctcacatgtttttaaaatttggacctagagtccatcctttagtaatggatgattcagtttgaaatggtgattctgtttctggaaaaaaacaaacaaacagggaacacagcctttgatgcagctgggctgtcagagggcggaaggttggaattaaagtactcttcaagctgttgctgaataatgaagggtagggcttcctcgttgggcagttaccacatttcccttgggagttcagagaacaaatattacctaatgtgtacaaagactttaaaaattaagttgattacaagctggcttaagattggataaagcagtaagaactaaggtccaccagaaggatcagagagtaaagatcactaccagtagtcacaggctgcaacggactctcgggacttctcacggctaaagggttaaggatcaacaggaagtagtcagtttcttaaaatggctagcctttgtaaaaccataacaaaggaagaaccttctacatagaacatgtacgtacaccgatgagctggacagtagttagctatgagtttggggaaattcttgcctaactaaaacatagagtgcatgaaagacctcatctcatagtgcatttggtcaccatccatcacctgcaatattgttgagaaataaaggcaaataattaacaatccgtctgttacagtgatttgctggcgtgataggcctggtataatagtaggtggtttacaggccaaaactagaagagattaaactgaaacagagttctaaagggcaggagagatggccaaaattggacaaggagtttcaggttcactgatttgagaaatatttttgctcactcattgctgcagtctttgatctccattttgctgcctcttaataaaatgaccaagaatatgagaagaatcaacagcaagatcaatatgagaccagggggggatattaactggagatattagaattagaattggtggtatatgcctagacatctttcatctcagaacaggtagattcaggaaatgcttgtaacttgactctgaagcctggaaactttccctagtgccttgtatttttgtttctgtgaaatgggattccgaccaaatagttcatttagtttattaattgtttattaacaaacacttgcttagaatgaggctgaaagatcaacgaggatggagagactcatttttgtactgtgtggccagcctgtgtcacatgccaccaatctcccaagcaaataagttctttaaggtagttttctttactcgtaagcctaatttcatttggacatagtaattgactatatttagaaagtaggacacatgccattgtaactcaggtgccatccccgggcagatggtcttagatgctctaacaaaaatggctgctcaagccatgagtagcactcttccatgggccatgcttcagttcttgcatccatattcctgtcctgacttccttccatagtggactagtatgtggaagtctcccaagttgcttatggtcatgctgtcttcttttttttttttcccaccccccccccatgctgtcttcttacaacaaagaaacataagacaactggaaagatgaaaatgtggtaaattgatacacaaaataggataccaataagcaaagaaacccaaaatagagtatatacacaacattcttgatggatatcataatcgtgtacaaaagaaaccagaacgtaagagaaaaaactatcatgtttacaaaggtgtcttggtctggatttttttgctgtgaagaaaaaccatgaccaaggcaactcttaaagaaaaacttttctttggggctgattaaagtttcaaaggtttagttcgttactatcatggtaggactcatggcaacatcaaggtagccatggtgctttagaacctaagaattctacttcttgatctgaagacagcagaagaagaatgtgttccatactgggtggaccttgtacataagagacctcaaaatccacctttacagtgatgtacttcctccaattaggccacacttcctagtagtgccactctctatgggccaagcattcagacacatgagtctatggggacaaacctattcaaaccaccacaaaagtcaaatttaatctatggtgaaaaaaacgtacctcttagaatgatggttgtgtgctaatcatttatcagaatccttattatgtttttaaattgttagttcagaatacaaaagcaaaagtaacaagattacatcagagtggaagcttctatagaccagttatccaatactgggtgtatagttatccaatactgggtgtatagttatccaatactgggtgtatagttatccaatactgggtgtatagccaaagaaggcaaagctgccatgctgaccagacataagtaagcactgccatgttcatttcagcatacttgacagtagccaagacgtgccaacaacataatgtcaaacagccgaggaatgggttaaaaaatacagtacagttatacaagaatatttttcagttctaaaagaatggagtcctgtcagtggtgatagcatggaaagaatgtgaagacagataatacataaatgaaatcagccgttcagagaaaaacaaggacttcatgatctcattcatatggcatttaaagatgctgatctagaaattaagagtggctacctgagagtcagagtagatgggaggagatggaaccagtttagtcaacatattcctcatttacaggtagaatacattatgagggtctggtaaaacagtgcaaagatgagcattgcaaactatttaaaattagaagaaatgatattgaatattttggcatgatgaattaatacatttctgagaaataatgtttatcctgaattggcatatatccaaacatcacatggtattccataaacataggtaatttttatgtatcagtgaaatgttaagtctgctgcatacagtttttaccctgtgttttttttttatttgacaaatgcagatttaactgtgatcaattctcatctatagtgcttcaaccaaactgtgtccctagacagtgtgttaattaaccttcaaatctatgttaaacacctttttctgacttcaagagatgtactagaacataaattgtcaggattcagaaatccaatattgataagagaaggaaccaatatcaatacaggcttagcagtgttgctacacagttatgttttctatgatgccactctaccctctcttctgagtgaggctgctcctctaactatgctacctgtcctagtaactggggtggaggactagtccacatctactgtctgtgtgagtacaatttataaggttaatagcaaactattgtttaagaacatcaaaaatgtctggaatttaaaaattattttccttctttcttctatccgaagaatgtttttatttattctgttttttttttctatatttttaaatagtcagagccaaaaagagaataattgaatattcaaagctgataacaggcaagatttcagttcctctccacatgtaagcttccctcttctctatgcttaactctgaggctggcgctcttggagcatgatttcgaaaactgagaaatctcctttacctaaaacacacagtctgtgttagcttattcaatatgattgcatcttatctgattttacttcttgatattcagctcccaactaacattacccaaatctggctgtaataggagtctttctttcactcatcgtgaatatttattaaagcacttaatacctgaattatgaaatgcagacacaagcacattaacctggctgagttatttcctttcttcctttttttaaaaacacatattttagctctgtctatcaacgccagatggcaactacattttgatacactgcatatttactaagtcatgtggtatgctttcaagtattttttatagcccttctatcaaatgagctgactcatccttcattcatttattcctgcttttaacagcttgcatttttagaaacttgacctcagctttatctaaagaatgaaggatattttacagggatgcatcagaagttccaaaggcctaactacaccttacatcctgtcaccatagcatatactcagctcttaatgttaataatattgttttccctcatattttaatggaacttgatactagatgcataatattgttagcaatgagaaatgcatttgtgtgtagacatttttaggatattcaggaaactaaaagtgtttatgattaaaatggccatgaaaataacaactgagcagctgatttttcccccatggggtacttattgaaccaatgggaaaagcacagtagagctaattccagtataatagctataaggactgtagtagtgccaggaagaggatgtactaggagtctatgacagtacccaaaggtcctcagaatgctgatgctaagatctctgatctccacgagagtctgctttcatggaaaggtttttccgtagacaatagtatttcttaatctaaggatatatagagtttagagatgaaagtacatggcactgaaaattataaccagtacatagtctatggactttctcttttctactgacccccaaagacactttttagttattaagtttttatggtacctggtcagtataggatattgtacatctttagatatctttacacatctaatctatgcactgttaattaatcaagaatatgggcttgaataaatcacaatatttactttggttttaggatgcaatactttctcttcctggcttccccttgatgtgtttgggtgactaaagtcattcctgaccgtgtctatgctcttcctttactatattttgaactctacagtgcatttgtccaattctaatcagattcatgaaagttgttcccctaaattctctctgtattgtatatcagctttaattccttcattatgctctattattctagattacaacttctccaatgctgtcattaggagagcagctttcccagcttgtggactgtaacattagtattgcatacagtgtggcaaatgtgttaaacagcaagtgtacaataagtggttcatattacacacactatggttttagatgctagtgatattaaggaaatatagtaagagagtgaaaaatatacttaataatgtaataaataatttttaattgctaatagatttctcagtaaaatttcagccaataataacaaaataatgaaagaaatgtcaaaacaagttaagattttgatagtttaatcaaaacagcacaaaatatatttaatgtaaatttacttaaagtataactttgtttcctcatctgatagacagctacttcaaagaataagtagaaaagatattcaatattttatgagttggcaattagagatcttagcaagaaatcacctagtccattactaaatatcataaagaattagcacctcaggatccaatatattcctttctgtcacatagttgtcaataattaccaagcagactcgggttaaagagacaatagaggaatacggagtatgcagtgagcactgtcagcccacatctgactgtaacacagctagcccctgagtcagagataaaaagctgagggtgacttagtcaaggacaatgacaactagtcgaggtcagttttgatcctagactaccatgtttctcctagaaaatctcattacccctttcacacatctttactaaattaatgcaaggtctattcggaatccctgccttacttactgtggatctgagatctccaaactggccttagggccttgtattctcgggtcttgtatttggaaatgacctccagaggtagggggaagcaggaaggggagactgtgagatggcaacacttagcagtcctttccatctcccccttctggtaaccccgtgtgttgtaaggactgatgtcagtcttcccttcttgagaagcacaaaactaccctgtctcagttcttgataatcagctaacttctggttggtttatttctttattacaatatattttaactgacatagctatgtgtatgatgtgttttatacatgtgtataatgctatttatacacatgtaagtatgggttcatgtacacatgtgtatgcatgcacacaaagatcaaagttctacctcagtagccatcttcagtcaccccccacttattttttgagattgagtctgtcactaaccctggaatttagacaggctggcaggcaagcctgggggtcatccctgggagattgcaagctgtagcactaacttacctgtgggtgctggggatctgaactcaaattctcacacttgtgctgcaagcatttttttaactgctccatctccctagccctagtcattcactagcaactctaactcagaattctgaatcttttctttgctttgtgaaggtatttcataaaccttcccatctacctaatctgcatattgtactgaagttatttatcttctaatgttttgtaagttcccttaggaatacccttagcaactgcctttccatacaaactgcctgggaaagtttaagaggatcaaatcccttgtaactaaacaaaatagaccttttgaatggaaatttaatagcaaattagattggcagcattacagggggatgaatgaaacttttgttttctttacatttacagtagaaaagtcaactcactctctgttatacaatagtttagatgaaaaattgggtttttttcttattttgcaatacattttgctttcaccacattctgtcagtgcactctccaaaacaaacctttaacctgggctgcaccccagttgcctttgcctgttgccctaggcctcacatgttcctaatggaagtagagttttcactggaagaaatagtctgttcaccaaatacaaactctgtgacaaggggagagaggggacatgcctttcattctcagcaaatgaggctccaggaacctgtcccagactccttgcccccttgtggtcctgattgaagagggttcttggaggagggttggcagggtctcctcccttccttccaatgcactgccctccctccagcttgtctttctagtgtaggagtttcataaaactgagaaattaggggaaaattatttctaaattatttatgcctatgactttaataaatggccccaatcattgattttttttttttaaagaaacaaaggtaattctcctctcaatagttctgctaagtctttgcattcttttcagatttttctcagggtttgggccttacaccatattttgaaaattctatcaaacaatctcttttctcccactagtctacaatcagcacatattttttcagtgaagaaataaaaattaaattacatttactttatagttttcggatgtatgtgtgtgttcatgtatgcaggtacatgtagaaggttgcatatatatgtgtgcacatgcagatatgaaggacagaagtcaacctcgggtggcagatggtagtcacatcttttctcccttccttccttccttcctttctttctttctttctttctttctttctttctttctttctttctttctttctttcgagatggaatttcttaccaagtaaaccattctgtctgtctgtctggccagcgagctccacatgccttcctgttcatgtctctcagcactgggactacagatatgtatcacccactccatctttttatgaaatgggttctcaggactgaacgcaggtcctcatgtttacatagcatgaactctacaaactgacccatttgtcccagcgctacagatgggctttatataacgttctttgtaatcatgtaaaatcaaaaatatatatatatattatgtccaaagcagttgcctgctgaagtttagtggtaagtaagtcctcagctcatttggcttcccataatgaaaatctgcatgtattagaagtgtatttagtttaagggtgacttcatctcttctcacagcacccaggaacacagcagaattaaataactgacctttaacaataccatccattgtgaactgatggcagccagaaagatattgggaaacaacctactgaaactatgttatctctcattagtaaatgaggccaatttccaggttgtactatcaaaacaaagcacaaggtcctggagtgcctgagagaagggtgtgaagtaaagttgaaatctcctcgtttgactgtgtagttaactaaactttccagttatgttttaaagtataatcacacaattttggggtaaaaaaataagcaataatatatggtaattttgtcaattgtgagtgaaacagttaatgcctttataatacatacacacatgctcacatacattttatatatacatatatacacatatacgcatatgtatacatatatataattttcaaggtgtggtggcacacacttttagtcccagcatactagaggcagaggctagatgatttctgagtttaaggccaacctggtatatatacatagcaagcttcagtctagccagagctacatagtgaggctctatcttttacatagaacgaataaatgatatttaatattcagctactcctggttacatttcccaaacagtaacatgcagtttgtacacaggcagctcttactgtacttccattaatgttgtgctttgtaatattcatttcagcaaacttctgagaaggcatcgtatatgtatgtgtgtgttttccaaaaatctgttataataacagtttacctgtcttattatgtgcaactgaatacctattatatttaggaaatgaaacacttgaatttcagaattagttttctgtgtgtgggggtttttttttttcatttccagagggagttatctcatttaaattattctaaacacactttctctgccattgcacatctacaaaatactgtgatattagagcttattattctcttttattttaccatattggaaatatcaaaattaggtaaaaagtgaatgaaatctttgacacacaacaaatatagatgaatcattaatgtaattttaagtatatagcactaaatgtcagtatactaaaaattaccatattttatgaattataagtgaccagtttataaatctgaacacaatatcattacttagtacatatatataagcacacaagtttatatataggtgacaaaactgcatgcaaaagaggacgaatacaagatgaaaatgaaaaccacgatggcttttaattcatttagatggaaacaaactattaagtaagctgaactacctggttagttagcattgttggaaagcttctcactcctgtttctaatttcctgatgtctgttacttcattagaaaattacaatttgactgactagagaaatggctccttattggttatgagttttcttccaaaggacctgagttttgttcccaaaacccatatcaggcagctcagactccctcttcattggatcaaacttcctctctggcctgtacagtcaccaatacacatgcgcacttgtgcacatcagacagacagacacacacacacacacacacacacacacacacacacacaccacaattaaaaataatataaaatgctttaacttaactatatgagtaaataaacaaggctgaacctggacaaatgatgagtatccgacaggtaccaaaatatgatcaatcaaattcaataccccacatagtaatagcattgtcactaccctactagccacactctacatgttagctactactgcgtcaattgtccccagatctttttgtttaagagaataagcaactactatgtgttagcaatctcatatcactgggaggtgaagtggcttgatgaaatactttgtggtttgttatggtgttgtagtcaaaatgtcaacaaaggctgaaaaactgtcatgccaaggcttctgtggctggaggattcttgaaatatttctcactcacttgtttcgatacttaatattgactaccccataaggttgcttgggtatccacatggacaggttctagccttcccagaaggagggatccaagtagtaaggtagaaatggtaatgggagcagcatctgtagtttgggatcatgagcaagtcactatccctgtgccacactctgttggtaacaaagaagaaccttgaatcagggtatggaggactatgtaagagagtgaatttgggaaatggcaattatcaacagtagtcttagattgccgttgtcacacagaccagcgtttccttacatacttcgcctcttcatttactgatgcttctgcatcccaaactcccgtctgtggtctgtccttggtggcattgtcagatttgtatctctctcccaaaccggacaagaagactacaactttctgcccttagtaagtcagcgccagccatcttctaagtccatgcgttccatttaatatcggatgacttctatgagcttctctctccgtaggctttgggggttttgagcagtattggttttgaattttgtttgttgattctagaatttcttattttcagtgtcctagacttcatatttcctaaacagtcccagaaagttgtcatcattttgttgttattatggatttattaactctcataattaaaataaggtacattaatttgcataatcagaaagtgtttttttccattgttgacataatatttgtccagatggtcaattgtgcactccacaaatatttacagagaaccaatcatgtgtcacattgtcacatgaaagaactagaaagtaatagtggtaagctgtgtagaaaaagaaggactgtcaaaggagaaatcagcacaatatacaaagttaaaaaacatggtaaacaatttgaagtccttgtttattctaaaataaccttctatttgaaggaacagtgcttcagccatgtcagtttagtttagtagctgttactctctagaccaactgagaatcacatgtcaccaagcaagacagcttaaaatgatgactcactggtgtaatatgtgagctggcagtatggagacatgtgcttcataataaatagtgcttgtctagtactttgtgagcaattgaagattagctacatatacttcctttcccacaactgcctctgtatgtgacaaaatgcatacaggtgtctaagccacaaagggatacattgattgaaaaatgtgtgacatagcatttgctatcccctgcattctaaatcagttgtcagccctcatctacagaaatagatccgtatcagaggatatctttatttccatattagagtttacttagagggaaggcttatctttagactaagaaagcagcagcactagagggaagtgcatgttccagccagtgtgctcatatacacatgtatatacatgtacacatgtaaacacgcgtatccgtactggagagttctgtgtcagcttgtcaccagctaaactcttctaccaggagggagcctcagttaagaaaaggctccatgagattgggttgtgtctctaagactgggctgtgggcaagcttgtagagcgttctgttactgattgtttggagagaacccagagcattgtaggtggggccacccctgggctggtggtcctggattctagaagaaaaatagactgagcaagccatggagagcaagccagtaagcatcaaccctccatggccgctcctgcctccaggttcctgccctgattgagttcctgtcctgacttctttcattgataaacagtgatatggaaacagaataaacctttttccacccaagtttccttttagtcattctgtttcatttcagcagtagaaactctaaccaacacattgtccatttgtcagcaaagagacccttttcataacagtgaagtgttgagcatattcttcttatgaaaggagaggtgattaatactgctacaaaatggcataaaatgtttttccttgcatttctatttatcaagatgtgtagtgtaaggcaattaaagtgtgattcgaattttgaatactttccaagttttatttttatggatacataatacacatacaaagatttctgcacatgcatatagaatgcaatgtgaagtttatatccatgcatacattctatgatttaatcaccagccttttgacaccaggttccatgatgctaagacaaacagaaaaataccattcttgtgggtgatcttcttaaagactttccagtatattctaggactacaacttgtaacctctgaaaggaagaactatgaaacaatttaaaacaattagaccacatttccttttttttttctgtaatttgttgagttggtggtgaaaccttgcctaggagcttgaattggttgactcttagaagccaaggtcatcaaattgtagtactaaaaattagctagaaatatttccagaaaaaaaaataagttcaattaagttgttatgattaaatatttgagaagttgacttttgtagctcccagacttgttctaactcagacaaatgttggcagtcaggatggttcccattctgtagcaccgtagctactgcccctctcctaaagaaaggcttagaaaatctgtatattctcatttccccaaagtgagtgattacacttccatctctggctctattccacccaaatttccccctttccacactgaactatttgttcattcctagattgccaatatcagttaagtgctgatcatattctagaacaccaaagtaattaacaataaggtgtgaatgaggtttacaggttcacgaggaaaatttacattttaaagagggtcgtgttaaacacaaatgaactcctaatagttggaatgtgtgagagaagatttctttctctgcagggcatggaggaagatttctcttactcctttttcagccctgagatagagatcaagaagctgagtgtggtggcacacaactttaatcccagcacttgggagacagagacaggtagttctctgagttcaagaccatcctggtctatatctcgagttccatcttgaaaaaccaaaacaaacaatgtcaaaaaaaatctaaacaaacaaaaccaccaagagtttcattgacaatctccagttgctgcctccatgcacagttacatagttacacagttacgtagttacaccttgcacagactgaccagttttcttctctagatccttttgggtgccaaatccatcctcaggtgtgacccatctgcagctaaaaaaggtggcagaagaaacctgctctcacatgcttgagtaatcttgctgttcttcatagaagtgtcctggaaattggaagagaaacactgtatttacaaaatgaaagaataataattagtagtaactttgagctttagacagctctttctctattggtttttaaaatgtccttacagtcatttttgaaggagttagaaataatgatattcacagaactaatctgaatttgccaacaaaataaatagtggaattaagattcaaatccaagatccaaaaaatttcactgcaaatttctgttttttattttttcactagtaaattttatagataaaaatacctttttgtaaattgaactaagcatgcttactaaaattaaagacctaagatagttcacagtctataattcatctgactttttttctcatcttaagcttatagatagaaagatccttcaggttaaagctctgagagtcaagccatagagttagtttatgtctttctcttcatggatgttggccagtattagcaatttaaattttctctacagaaatattgtcagtgtagtgtaaataactcttgttaagcttagagtcaggcaaccccataatttgccatccaaactggagagcttttaaaagtgaaagcggggactattcaaagttggcatctgagcaatcataagggaaactggaactaccctggatcaagtgggggacactatcacccagcctaaaaggcatcattctaagtcaaatagctgggagagcgaaaggccggcatgttatctgttacttgcaagtgcatgcaatgattagggaccaacttcaagggaaatgcaaaatcaagacaagtagcatcaaagttaaatgtgtcagtgtggaactacgcatatcttaaactaccatgggagccaacacttttttttctcttgataacaaataccctcttgctacatgctgtccacgtatatgaaccttccacttctgcctctgaaggattttgtctggagatggccctagactagagtatcacagtcagccaaagtgccagtgtcagcaatggcaggaagaggactgagcagttactgctaaccattgctgagttactcagcagacctccgaacacgattacttctcatctacctaatttaaaaagttgaaagtaacttcatttgttcttttaaaaaaacaaaacaaaaaacaaagccagttttcttaaaattttaatttttattggaagcaggaagtttcccttcttgacagcttcttgaagtggtaaaattgtctaggggaagagttcacaatggaatacaggatgcattacataatgcagtcctttgtttatggagcctctgacagaatcctgcaatttgggctgatgctaaatactgccaccaaagtcctccctaactttaggcaactctgagtctttctctccacctcctgccatgattattctggcttctgattgaatcacaccttatgtttaaagtcactaacctaaaatgacccaaagctacttatttctctcctcaacagttccctgtgactggtaatatttggaatgcctgaaaatagcctctgtcccaacttctgtagcccctactccaaaagcaaatgctataacagtctcttcactcgggtttttaaacctcaggtgagagattttggaaactaattagcatgctaaggagtctgtggcatttaggtgagtcacagtcacacaatctaagcaacagagaaggaatcttgttgctaggaagactggggagaatagatattgggtaggcaacactctaatccaactgtaatggcaaaaaataaaagggaaattaatgtgagctataaaaactaaaatataatttatgcagaaggtaggaataaggtgcattacaagataactaaagcaattagattgataaatgaatgctgattggattctccagggaggagcaggggctgaaagctggaacagccaggctctacatagtggccactgcttctgaagttctttattcttgagagctaggaaccaaggcttatttctgccctaccacctcagaatggacagtacttactaaactgtgataagtgcatgaatacgatgctagtgcagtcaaggagtgattgacaaattatagagatgctagaaaaagaaaactgaaactggatgctccctggaacactaagattgaaaatatattctaatgtggttgttacatacaggaatacttcttattaaatatgagaaccggcgatgcctcgaaagatgtaacaagcaatagcagctaaagtaccaagtcagtaatgagcttggcatttgaaaccaagttatgtttctagagttagcattttgtaatacacaaataatagtcaggtgcccatctgaagtctgttgcttcctcttgctccccttccctgtgttctctgcagtctccaagaatttccagcgttaaaaggagcttttgcaaaaatggaaagtcattcgctggagatttaaagtttactatcgtagaaatttgcacttagtttcagttcttgtcatgaggattccaatcgagatgcctctggtcaagcagattgttaatttccataatgaattgatcctcttatcatgtaatgaccttctttgctgctaatgacagtttgacttaatcagtctaatgtggttatgattttcttggaatacattcctccagctctgtccttttctgcctatgttgttccctcaagctaaagtgagtttcttggaggtaatacttttctggatcttgcctttcttctttatactcctttattcttaatccactcaaatgctccacttcttttgattggggcatgtaatttatttgtatgccccattaggggaagacttcctgtgccatcttgccaattttggcgtattttgtactcttcctcatttcctgttctgcactaggctttgattttccagtgttccctttttgtttctctctctctctctctctctctccttcttcttccttttttcccttccttgtctccctgaatatccttcccatctcttccttttcccctctccctttctccttctctacatgccaactgtatctcctaagttttggttttgtttttttttttttaattttcaaattttgacagtgtcacactaagctgcccaggtaggcctctgacttgtgatctccctgcctcagaatcagaggaaggggttttgaatcctggtttcctttctcttttcattgtataactactatagcttttatatgtatttgtcatgaatcttccattaaacaacttaaaatgagctccctaagctgataacatttgatagcatacagcacctctgtgcttttcttctctgctctctacactttccatgtttcagatgccacagcttactgtattatgctatgtgtacaataacaagttattacaattgctagtattcaacatcctggagttggaagtaattcatatacgtttattatactgttagcgatctctggcctttgacaacttacctttctgagtgagttctacccttttctatgttctcacactggtaattaatgtcctttctcttcagctctttttattgttagtttttaagtgtatttagttgtgatgaacttcctcaacctgtttgtctggagaggtctttgtaccttatttccttcgctatattgcaggacagtttttctagctacagtggtctcaattaatagtttttctacaatgatttgagtgtataattctactttcgtctgacctgcaaagtggtccaagcaaacttctgaacatcctttttgaacacacagtaattatttttctcttgcttccttcaaaattctctttgttcttttaacaatttgattacataatgccctacacatatttcttatatctagtttgagttccttggcctttatgaatatttcctccccagatttgttttctcttctgtttctataaatcatacacacacacactcactcacatacacacacacacacacacactcacactcacacacaccctgagtctctcttgtctatcatgtgtttatggacttcttctgtttcatcctttttccttctatttttctttttgtttccttaaatccatatttttaattgatctgttttgaatttcacatctgctttgggaggcacaaccctagtgagtatttctggtcaatgttgtattcttctgctccagtagtccttgcttcactctattgttgctttcgtctctatatctttattagcttctcgttttgatcgcgtctccttttcatggttttcttcagccctcttagctgttggtctgtattcttttgcagatcacctagcttctgtaaggacaaccagctgttttgaatactttcttagtcaattcacagttcttcatttctatcagattggttgatttgtttcctttgattgtgtcatgctttcttgattctttacatttttcacaagtttgttttctgtgtgtctggaggagcgaatacctccccctacacccaaccatttgaagtagaagtgactgagaaaagctcaccagtgaccactgcttgatgtgagggacttaggtggttactcagggacacctatgagttacaataaaaggagccacccgggggccctctgaagttgtgcctgctttacttccttctcgccatcactgagaacagcctcgagtatgcagtttccaaatcttccagagaactagttttaaggagtcacctcctcatttcctatatccttagctgccccacaggactgggttctacagggaagccagaactgacaaagtcggaagccagaactgacaaagtcggattccaaagcagccaccccaaaaaggtttccaggcagccaggaacgcagacagagcggtgccctgactaaacctactcagttttccataggagaattcatggcctgcagtactgtcggtgtgaagttaagctggtttggaggggtgagagcccagctctagtgaaattgctcatattgctacttgaatgtgactcttcttgccttgtgtcttcttagtagtggtgatggtgtgcttctacgtctcagctagatctcttcagaatattgtggttccaatagtattattagagctctgttgcttgggcaagatgatagggaacattcatgctttgccatcacactaactgcatccctatatgttgtctgttataccttaattttgccaagacatcaaatagagtattagcatgtgcaacttcagtaacagcatttccagcatgcctgtgtctgtagccatttaatgaaatttacttgtaactttagaccaacctccttggttacattagactacttcatgttagctgagttaagtagtacttcatcttttgagatttatcatattttctgattacatgtatagatatgcttgactgagtgaatacgtgcagatgtgagtgcaggtgccagcaatgtccataagaaggattaacatcccatgaaactgtggatataggaagttgtggccacccaatgtgggtgccagaaaccatactcaggtccgctgcaagagcagtatgaactcttttttttttcccgagacagggcttctctgtgtagccctggctgtcctggaactcactttgtagaccaggctggcctcgaactcagaaatctgcctgcctctgcctcccaagggctgggctcaaaggcgtgcgccaccacgcccagctagtatgaactcttaaccactgagcacgcgcactcctctccttaaacagtgctgctttacttggatagaggaactcctatttcagtttaattaattgagcgacttgttttcagaagcagaattttaaaacaactctgctaaagacttatattagtaacattgacccttttataactcattgtgctgtttggatttttgtcaatttgatataagctacagtcatttgggacgaaggatccacaattgagaaaaatgcctccattagactgttctgtagctaaatctgaagggcattctcgtgatgaactattgacatggagggcccagtccactgtgggtggtgccactccaagacatgtagtcctcagtagtaaaggaaagaaggttgacccagccatagagagcaagccaggaagctgctttcctcggtggccgctgctttagttcctgccttgatgtcttcctgaggtagagaggaaactcccaaagttgcttttgcttttggtattttctcaaagcaacaggaaccaagctaggacagttactgtttattgtctgtgcaataagtcagcattatctgtagttactttgagttccaacattttatgttcttattgttcagtttaatttaacagatactaattaatgggatacttacaaaacacaaactaataagctagaacctgagtggatacagagattaaataatgtgatttttcatgcaaatacttgataatgtgatacaataaagattgaggtgtgtatctgtaatacatcctagctccttgggtttggcatcaaaaatgtatggtcatttctttcttagtatttctcatttctaggtttggcaaagaaaagtgttctctgaactatcacttggctatacatttgtatatcgttttaattttaaagaatcattatataaagtatatcattatacattttaatttatattgttctaaaatcattagattatccatctgcaaaaaaaatgtaattattccctttctggttattgaaaagctaaacagtggttttatgagaattgtacaaaacagtgagtgggaacaggtaacaatgcacacgctcccccatgctccgagctgcacaagcagcttcctgtgcatgttacagctcccacctgttacttgtgacttctacacagcacatatgattaccctttattcctacctaaatagcagttagctcttgattccagtggtttcagtggcacatctgcacagcagatctgctgcccaagctgtgatgccctgagagagcaggttagactctggtgtgcattagaggttcgagtaaggagaggatgggtcctcttctacaagccggtccatgatcctcatgctagaagcccagaaatcggctgcaaagaaactggcaatttgggtaggtgagtaaatcattctaattatggcaacgtagaaacttgttttcttggtagtatgagaatttcatgcttttgaaaagtatcagaagggagaacaaatctttataaatctcaaaagaagctctctagcagtgaccaatttgatttctttccttacctaagcctttctgggtcataagcgggttatattcatgtcgcgtcccatgattttcttagtaaaaaaatttgcatctgaagcctaggaaaatgtttggcctgcacagttgaatgtttgaacaggtgtgtgctgccctggtctggctgaggaaggtagtcctagtccttagaacctgctattaggagagggtttctcatgccagcttccaggggctcatcagcaaaggctccggtgatacttaagcctattacctgcttactaacccacttccctccttcccctctgtgttctcatgaagaaattgatttaatagtttcaagatattattaaatacattctacattaatattatatgtcctctttgaatccaagtggcaatacaatagaatttcattttataaataacacctttcaagctaacaccacagggcacagtacaaaagaatcaaaatagaacacaaatgctgtaatcaaatgcagaccccaggaaggctgattaaaaaggcatgttgctagcaagagcagccgacagggtaagtagagtgggtcatagccgagaagccagctgaacagaagggcaaacgaaaataaaatggacttgccagcccgttttacagggattcatgatgctctgtgtgcatcatctcttcttgactcgagaactgactcagaggtatgtgaacatggtgtggagggagggcctcaatgcagggttagtgtgtcttcccttggtatttatatgtaacacaaacaaaagaagcccttaagcatccccacctgtgattgacagagatgcccacaatgtgattgtgagaggatggtgaggggatccagaaagccttgtcttgatggatgttactcctggtttttcagacatgacatgaaaagggatctattccactgcagtgagatgagtactgcttgtgaccaggcctagggaaagatggacttatgggtgaggcatgagcctccccaaagtacacttcccttagcactctactgatccacttagaatttgtgctcaaacaataagcaagcagttttctaatgtcagaggtttttaaacctaacttctattaaccaaaaaaacaaaaacaaaaacaaaaacaaaacaaaaccaaaaaataaaaacccaacaacaacaaaacccttcttacattaggaaagcaagcagaagaagggaactgtgttggagtctatattcctaccttggtttaaagctaatcccaacagtaatcatcacgtgtctttagtaatgaacccaactgctcactccctggtgcttttttgtttaataaaagttttacagtgtaggagagtattatatcagaaacatagaatacactgatttgtagttaggagagaaagaaaaagtgagacctaaggtgggttttacctttctccaactttgaattatttgtcatggtcctaatagtccacatcactgggattctggtgtgtggaggggatgctgatttgggtcacagagttagatcagtactgtcatatttctgtttggccttttccttaagtaaatcataaaagtgtgggcagcactgggagagaagggtaactgtacaaatattagtactgagtttttttaaactggtgatgtataggtttccatttagtagcctcttatttcccttccttctgacagtatttatccagcagaacagagggagtcagttcattaatgaacataaataaaagtgcaatacattaagaacactagatcgtaagtccaaagtgagttatttcatgaaatgtgtgagcaaataatacctgtgtctgttaccaatcgccttcattgattttctattgctgtgataaaatccatgaccaaaggcatctggagaaagagtttatttgtgcttagagatcccatccaaacccctatagggaaacagggctaactggaagtggggcaaggctataaactctcaaccccaccccagtgatggatttcctccagccaggctgtacctctcaaatgttctaaataacctttccaaacaatgtcaccagcaaggaccccagtgttccagtacacaagcctatggagacagttctcatttgaaccctaacaaccctttgagtctaaattcacccttccttacctactctacaaaaattgtgactctttaaagtattctcctttatcatttctcagacttgtggctaagatcaagttaagcattttcctttgtccactggcctgaaggtactttgtcagttgagagtccagtagacatactacagagggcttccttcctggctctatctactccattggccgactaatgcattgtgcacaatttctccagaacctgacttctttcttttgcataacttttctagtgtttgtcagtatggaacatactcctatctatttgctccagctgaggtacagatagcaaccccactacctgatctctgcccacttctcctggcacacaccatgcaggcacacatacatgaggttctatcccatggatatcttttactgccactcaaaaatacaggtaccaacaatttctgttgagaaagctctctggcacatttctggcattcagtagacaatgcctgtgccttgttgaacaatgtctgtatccaaatcctaaaagattttacttgtacccagcaaggtctggattgttgtctaagaatacaaacaacttttccttgaacatgctatgtgagctctacaaggagtggctattccttacatttgctgttctttcatgtttagagttatctttaattcttctaaggtattctccccttattctagtcacctattagtgttaatagttctttactgcaatgtgttttttctcttccgatggaacctgcttcatacactccgaagtaacattaaaatgatctgtgatgcttagggttggaggaagtccatatgtcctcacaggtcagactaagattggacctggatattagatgaacaaaatgttttgagaatttagttagctagaaaggcagcaaacggtgatgctataaacactgtctgaccatatgactttactgatctacactttaaaggattttactctagttctcagtgaatttgttattaaaaaataaaaatctggattaatttgttgaccttggaaaatgtgtcaaaatccaatattatataatgtgaatttataaattattaatgatagctattatttattgagaattcagtaatcttcagcagttaaatttattggatccatatagcaatacagatgtatactttgactctctcttgaaatagaaaaagagattggcctcacaggtgatatatctagcaaatttcaaacaaacaaacaaaaaatttaacctagaactttctgtgagccacagcttgtcaaaaccactccgcttccaaaagccaatcataagttaccttggaaaacaaatagggtattttcagtctctcagtcagagatttggagaagagctaccacaagaatctgcaacatgtttagcagcacaccctgagatactgcctgtaccatcaacctgttacttaaccagatatggataaactaagtgaactctggagatgaaattcccagaacctaagtgttaacagagtatctaaaatgtagcagcctttattctgagctgagttgaaggcagatgaaatattaacagcaagttctagcagcagaaaatgaaatatgagatcctgtatcagaaattattagtaacctgttaaaagaaatgctgaaaaatggcagttaccaaattaaaactgggaaacagagcccaaatgggaaatttcaaaaagtttggaggaaaataaatgacagattgtcctcttggctcttattactatgccatcctaaatcctacttggcaatggatggtggaggtgaaataagagcggcatccctgccagcgttggtcctcagatttgtagtcctaagtgtctgtgatggtgtctggggctgactggaaacgtagttgggagttgatagcatttgagctttatctaaattgaagagcctggagactcttattatgaaaggcttcctctcatttgtgaattggcccctttgctccactttggatggctggcttcctccatgcagagctatactaaatgttctacatgggaaagctattctccttaaatgccttcaaatttaaagcatctatctgaatatgttcatgtttatgactcaaaatatctaacatcaaaaagaaagagggggtacaaatagaaaatgcccagcagtaaatgaaggagatatttttccttcagtaactgaaaaagaaaaattattttatgcagagttgttgagcatttgatgccagaggggagaaaaagggaaatgagctatagaaccatagaatcttactgttggcagaaacagcagagttcatgcagtcctaccctatcatttttcaatgaagaaactgagacatggggagttaagggacttgacttgcccaagatacagagttgtttactgacagccatgccaaaaatatttcccaactccccacacagaactctgtatttcagcatgctgctaccactctctgctgaaaattaacaccaatacagcccaaacacagaggagttcagtgtctgtggagaccaggagacggatgatttcaaggtagaaatcaggatgggaaaagaacagagaaaggatgactgtccgttgtgactcctcacacaagcttttcaagccatttgctgtgggcttactgtcccctacctctccaccaaatagaatgaagaagaaaataaactttttgtaatatctaaagtttgcatgtgttcaaatctgatttgcccagggaattgtgcgtacatgctgtgtccggatgtagagtggtttgtaggtggcacgcttactgtaccctgctattttcttcagcctgatacagtttctctaactcagaaatgcttccctgaaatctcaagttagtttcaggacaaggatggttcctatccatggcacacatctaagaatgacaaataactttaagatgtaagaattatcttctcttaatcttcatacagaattgaaatattgtagaactttagctcagtttcaagatttggatgaaataatttctgttttgtaaccatatgagtaagtgatagtaaaccagtccagataacacagtgaaaaggactccatgggctccccttgcaggccagtccaacaaccttcttcacaatagagcgaccagagatgagagcctcggccacatgatgaaaagtgcagatggagggctttgcatgaaaaccgattatgtgcgagagggctcaggagaggatcggggtggaattggaaaggagcggccactgaaacaggagaagaagatatgcttgaccaggtctagtaaaatattccctgccacaaccactgttccatgaagagactgagccaagaggcctaaataaactaacctgggggtcagtgttaccattaatgtgggaggcatcatggagagcacatccggacttgtgttacacagtaatcactgctgggtgtcagcattcatcagccagatggtcagacccacaattaatcaattaggctgggacaatcaactggactaagttttcccctttggtaaaacagcctcatcatgtggtcaaggccaatagcacttttatcctgttgcttttggagtagcttctaaaaattccctcattttttttttcttttggcctctggttactagacactgtcaggctcccagttcctttgataacatggattccccaatcaaggttttcacataatagatcatcagcatcccccgtattcacattgtaacactgaaaatcccacatgaaaacaagctcttcaaagcagcatggtaagccctacatccaactgatctcctgtagtatttcttctggttctactcaatctggtgggacaccaatggcagagcttctctgactgggcacataagggtgataagtgatgctagtgataatagtagtttctggtgtattcggcgtcagacagacataccatgacaaaaatagataaacatcaactcagcctttataacgccaattaggatgatacggtcacccccctttcaaagagaaggaaacagactaggaaattcattgaacatgtgataggatactctactgacatgctgtgggacagaagctacatagcctgtcatacatgttttcttaacagacacaaccttgtgcctctgagagctaaaagctaagaatgtgttctagatcttggcggctccccttcaaacttcaagttgttcactagtgtttttcttctctggaggctcattctgcttcccatgctacacagctccaaaccacagccggactttccccttccgtgtcgagggttcccagtctcccgctcaggagccttacctacattggtatctttctgtctgttttaggtagttttcatcagttgatttatagcacagcttgcctctccatcactgatttctttttttaacttagattttacccctcctttcttttggcttacctctggctgtattatagtgtacagcacaggagtgatgcttcggaatcctggcggtcactgtctaacagagtcctggatactatacgtattgggtagaactagacgcgatgcagtgctccctgtgtgcaccattgaacttgctgtgtctctttcctctcagctcttttctactgtcagacttgatgtagacttaatgattttgtgtctacacaaaggatgcagtcatcccaaatatccatccttgatgtatcagttactcttacaactactttatagagtatattacttctctatataacggctatatttgcttttttgttttgctacttagcaattggaaaacatatcagaatgctaaaacaatatagtatggaactacctgtttttacttgaacttacagcacatgaataaataggtgctcatgtagtaataataaccagcatgctttagccttcagagtctgttttgttcttacggccgttctttctgcagttttatattctttaccccagggctaatgaggctctttcattgtgacctgcagtatcctgcatattacacagttgagtcctgccatctaggctggctttctgcttcattttgctcctgacctgcctccccccccccccccaacccccaacacacacacacaccccaatgctattccaggcctggcctctcatgaccagagactgctgactcatcctggcctgtgccaagctgtgcagtcgcttagtgatgtggacaggagtcgaaggactagaatgagctcaccgaactcatttcacttgttgcttacggtacagtccagcatgagctggaannnnnnnnnnnnnnnnnnnnnnnnnnnnnnnnnnnnnnnnnnnnnnnnnnnnnnnnnnnnnnnnnnnnnnnnnnnnnnnnnnnnnnnnnnnnnnnnnnnnnnnnnnnnnnnnnnnnnnnnnnnnnnnnnnnnnnnnnnnnnnnnnnnnnnnnnnnnnnnnnnnnnnnnnnnnnnnnnnnnnnnnnnnnnnnnnnnnnnnnnnnnccacaccctccctgaacttcccttctgaaaatgtccggatggtagagcaatgatctgggcagaaatgaaattttgttaataagcagcctccgcacgaaaccctggaacacagactctgtgaaactgcttagagtagcctgtatcctgggaactcacgtgaacttcccaacagaattcaaggacatgagaaaagcttccctacctcccttcttgagtctcttttctttctgttttaagagaggtagtttcaggagacatggctgcattctggtgtggtgcaaagttttccgtcgggagacaataatgtacattcctctggcaggatgggatagtttttttttttttgtttttttttttttttttttggtgtgtgtttctcttgctgttgtttatttataagacatttcctctcagttagtggaagttagatcgtaagaggctccagtgattttccttccacctcccctccctaatttctgtgcttcagcactctggaacactgtgaactcgacagactaatcagagcagggagcttagcagccaggcctggacactctcaagagactgtgtgactctcagccgtcactccctggatcaggaaccacagtcctggtgagtgggggggagcttccagactctgatgtatcaaggattctattcttggtgtctctgaggcaggcaggaaataaagggtattttaaaagaaaaaaaaacatttaaaaaagcctgccaaacaatcagagtggtaaggagttttagtgtgtacagctgagcgcactctggacaagggcagagccttgaggctctgcttcgaagcagcctgcaggactagggtttgtgctgctgccacagagggctgtcagctttgacatgcctagcaaacatgctggtgggaggaggaaggtaggtgagtgactggggcagggaggaagagctcagggtggtgggagggggaagtgaaagtgggaataattattcatttgaagtttctctccctctgctaacttttgatgcatttctgttctgagcagttgtgccatgtgcacagctagctgagccagatagaaaatctgtagtagatgagccacaaaaagtttgcgaggactcttcctttagagatcatttccttgaggctgctctgaaacgttaggagcctctccccatctgacttcaggaaaaccttatgtgtcacagcctattctttattcttctgtactcatggtactgagtagaagaatgcagtgagactccttatatggctccagggaaattcatcgtcttgacaaaggaaactgatgattgtctccacaatattgaacccaaatatagtgttgtcctcaatataagaagagaccgattgagtacgctccggaaagttgtcaaaggaatggaatggggtgggggtggggttgcagcctggtctgtcatagccagtagggaccttacgtgttgttcttggtatgcacaccctccttagaagtgaaatgtcaggtgagtgggcttgtcttctgctgtcaagcccctgctcgttgttgttctagacatgttccatcttactgtgccttctcgcctttctaaagtcaagtatgtggcatgttctaagatattaaaggaaaaaaagagaaaacaaaaaacaaacaaacaaacaaacaaaaaacccatggtggctattaaattatttgtctatgtggcatcctctgaagtgaattgctctttggggaggggaaagagtctttgatgttcccaatatggttctcataggcttaaatttcccagaaccacaacccagcctaaggggtccttactcaatgtccttaaatatttgggaagaaatgccattttattgttttagctgcctttgctattaacacattgccagtagatttcttctagggctgaaaatgttttaataacagctgattttacagatgcatctcctatgtatctgttatgtgtatttacctttgctccaactggtacagtgattcagtgtataacattgatacttagctctggaagtttgtttgctatattgggcgatttggattcttaaccacagaactcatgcatgctcctatgtcccaagtgccctcagacactgtgtactgctacagtcacaccagggtttgtcagtgacctctagagcaaatgacttcctagcacagctcctgtagtttccaaggttcatcaaatcgattagctttcggtgtgaaacaatgttgcttcaataagttagggccagaaaggaaagcctggtatgatagactacatttctgttagtccatgttagtaattattgaactattcatatatataatatattatggggtacttttatttattttgttattttctacaaagctaaacaataaaattgtgttctgaactttcaaacatgacctaagaaatgtatggagctcagtggccatccagagctacatggaagtcttcctgtgtgtgtctctgctaacacaccaaccacatacactgagagagaaactcagtctatacaagctacattgaagacagctttgtctattaacacttggaaacaatttattctcaagaactatggctgtacataaaaatttgtaagcaactttaggcagagagtataaacacatttacctaatgttatgtcccaaaaaattatattttacaaatctagtctgccagagaactttttcttttagttgctaagatctatatggtcataaaaatgttgtggtgaactgatgtacataagaagttagactttgattaatatatatagatagatgcatgtgtgtgaccagagagaacatgatgtctttttataagttgacatagttgcattcaactatgtcattacctagtattttccatacttatatagtaagcctttatagcatactgttactaattctgtttttcagtgttcatctgaaagtttaaatttcattaaatttctgtgttttaaaatatatttttataatatatgtgttataaaatgtgtttcttgcaaacaagttttagatgggactatttcctatatattatatttatttgattaggcagttacaattatagacgaaagaacttgttcagcagccagcttttgattgccccattaagaaactgtctaatgcttctcagccttctagccactccagtatcaagggaagaagttctatttgtgaagaaatttggggaatagtttcagtggcttccctaggaaagactcatattctatatgttacaagatggttttgggacatatatgatgagtatgctaacttataaatgtatgtatgtgtgcaaaactatgttcttgtatatttaaattgtgattttacttagactttctagatattgaattccacaaaatatttttaaactgataataagcaaagttaaggggatattttatcacattgagaatgcagtttatacagatatttatgaacactatctacaaatgagatgatataactgataagtctaatgattatccttggttaaacatacatatcagattattaacataaattctattatgcccagcttcaaaatattaattgttctgtgtaagaaatagcttaaattaactagacagaaattaaatagctaataattaaaattgagaaatatatttaatgaattcatttggtaagaattaatacatatataaatgacccagtttattttttctcattcctcggctactcagttgtatattaaataccttaatactgcagttacatattagtgttagaatatcatttcccagatatcctttcaagatacccagtcagtcaagtcccacttctctaatgatggtctgagactgacaacagttttgcaggcagcagccatccatcacttaccatatgccgccttgaattgaaaacctttgaattgatagaaggtattatattttgcacttgtgtattccttccccttccaaacaatgtcatattgcctcaatcttagtgggggagctggaggatcaatggatagggaatgaatgattatctatattcattggcagtgagtatctcttggttaccacaattgagaaacatgtccaggaaacaaatcaatagatttttccgtgactgtctctccttattagatcttccaagagccgaaactgtcccagccatttactgggatagttcctctaacccccaaaggttaggtcatttctgatgaacatagaggtcttgaatttataggagttttcttcattttctagaacttgtgtaggtaaccagatacctatcttagttcatgtagtctgaacatagcacactacctagaatattccatgttagctagagcttctacagattgtgcatatatgtgaatagtcaatcagtggttctcccttttctccaagtccacagttaaggaaccagtagatgggaggtgtggaggcacaggaatattagctatgaatgctgtaagccagacaagagagaggtgaggcagacaggcagcacaataaagaccaggggcaagaggacaggcagccaaatcatttgcactgtcttaacaagcactaattaaatgccctgtttgaggtaaataatagctgaaaatagccaagttcaattgtgctgatcgatgaggagagaaaatggtagattcacttggtgctcgctccttcagttattaagctgcagcccactgaggcatcttcagagaaggggcatcagttgagccagtgtctagtgtgtcatttgctgtgtggccattccagtaccccatataatgccctgatataataagcctcataataagtgaatatattatgaatatgactacagtaagaaataactaaatgtataaagtggattttaaacttaactattagtggtcaatcagctcgacaatccctaatctgtactcaatcctgttttctgaaaatgattttccagaacttttcatacgtctgtgtgtgtggaatataaataggatgtttatttttcatatttttaaattttttctctctgcactcgctagtacactggattcctaaatgtgagtagccaggggtaggggggcagggaggaaagtcattcacaaaatggataattagccctcaaacagtgagacgttaactcactcagcagacaggccgaaaactacgatgttttgttagtgactttgctcttctttgggagttaacatggagaggacatttccagtagcacagacttggcaccaaatcacctgtccctcctcaagctacaaaataccaccttcacctccagttccttctggcagggtttgcagtatgacggcctcgtggggagtgtatacaaatcactctaagggacaaaattgtatgagtgcctaatccacttttgaaaatgaaagaaaaggatcttttcatgaaaggcagcaaatatggaaggatataaattgtaataaaagatattagcactttcacctcctgctaattgcctccctagtcaagaggaacaaaatactgtaataaatgttacagctacatcatgatcagagtacaaaaattgtctctacatttcaatagcaaattggaaaaaaaagaacaaatcaggtagacttaatttaggcttctaaattaggggactcatctgcttcgttttctaagaaagataatggtacccatttgactgacttgccagtgttttttgaggatcagagtataaagtctgtttctccattataatcattaaacattttttaacattcattcttttttcattcacaaaatatttttgaatctgtactctaacagtttttattataggagctaatgaatggttggtaaacaaatattcattgaagagctcaaactctgtagctgacattcttccaggctgggattcaagagtaattaaacacagagaagtctctattctcatattatagattgtctaggagagacacatcaggaaattcatatggaaagtgcataacctgttcgtgttgactgctgtagaaaaaagtcactcagggatgagaaagatggggcttatgttgtcatattaaattacatggggacaacatttgagacaaggcttcagtgaaaggaagggaacaaattttgtcaagtatattttcagtagaactgtccagtgcgaaggacctgaacaagggcgctgtgcttgagcataggaggctaaagagaattggggtcagtaaaggacaagaagagtcagggaggttgtggaaagtttgctgtgctaaggtgaagatactaagctatagtgagattggagcacaatgtaagttactatacatttctaaaagctagaagaattttaagttttctcatcatagggaaatgataattatttttaaaaatgaatgtgttcagcttgatttaatcattatactgtatgtatataattaattactgagacatcatatgccccattagtatatacagttgtatgttttttattcagatgctgaaaataaattttaaaatgaaatcattcaagtacatataaataaaatactgtagattgtacaaaagtgaatataccaggcacactggagtgataacaaagatggctctatagcaggagcagatgggagagaggaaaacagtaaggacagaataatggaggccatgtgatattgtcccatagcccaggagcatgtgaatgtgaacatggtaggtctcctaccaatagtaaaaggattaaataaggagagaacagagaatgaacttgggataatgtcacatactgctgaccaggcagaagggtgttcaaagaaacatagattgtccaaacattgtacagctcagaatatcctggagtaaaacattgaggaaaccgaaggtaacaatgctggctgggaaggattttcccagaaggccaaagaaggggaaagaatttagtgatggcagcagccggggcaaagtttcttaagtaggggacaggggacagagatgaggaatggtatcactcagagttagttgtgcagtacagagaatagcgtcctatgtataagggaggaacagtcatggcggccttggttgccatccaaagatgctttaactgcttgcagcattttgggagccattaaaaggtttcaagtagaggttaataatcacatcgtgtaacagaggatcagcctggcagcagaaagtgaaggatagattgtaggagtgggagaggagaggcagggaaatgagttagggggcaccttaaattgttcagtcaggaaacaatgaaatcctgaactaggacagtaactgtgggaataggccgaaaggaggaggtgtgtttagagataactgacagaatggacacaatttaataacctctgggcctggcatgaaaggaggaggagttctggattgctcccaagttcctgccttacacaactagacaagaaaagctatgaggagtaagtcttgtagactgggaagatgataaacttgcttttgaatatgtttaattgttgggggagcatccagactggtgtccagtaggcagtttgattcagtcaggaatactggagctagatcagggacagagatagatgcatagctgtcttctgaatcatcattgccatggttgaagctcaaattatgaagtcgatatgtctcaaggaaaatatgatgaaggaaaacaaacaggatcagactgttggagtaccggtgtttatggaacagagagaaggaagtgacaccatcataaaactactatctatgtgcctgtcagtgtgctagatacactggggtggtgggcaagatgaacagcccagagcctaccccagaagtacacacggtctgtataaacataagaggtgagtgttactgtcactgccaatcacgggacagtactagcagaataaatatccaagtgtaacacagaatcatacagaatatttaattagagagattgtaacagcaaaagttttctgcttgcagttttgcgatagagttcatttctgatttctctgatgcttgtatgtgtatgttccagtgttagcatgggttcaggctattggcaaaacaagccaggtgtaaattatggtagaattgaaatcgatagtgctttgaagcactggagtgcccagttcacatcagggcgtgcgtctgtgttcactgaaacatggctatcaagtgcaccccgagtcattagatgtgttatccagtgaataacagcataatgatattttagcagagctgccttatgataaattctgctttagtgaaaccccatatacagagcaatttcttctggccgtgtatattgcatggcaaagaaaggataccctgctgcgtatcagaaggctgtaatttcatttaggggttctattgacattgtaaactgcaagagcagagctcaagtggctatttaagtcataggaacttcaagctaaaattactgcctagtcctaatcgccacctccagggcactcttgcctatacatataggctttatgtttctatctttgtgtctataaataatcactccaggggatgaaatgataagctgtcctaaaatatgacaggtatctgtcacctttgcagatgatataggcttaaaggctgaatacagctttattattcattgaaggtcaaatgataaaagggaacccctcctctcttacacagacacacacacacacacacaaatacacacacatgtgcatgagaaaggtcattgtatgagcaactgattttttctgctttaaaacattatctacacagtgtaacatcaggttctttcactcgttcacagtagaaaacaagggactttccgacgatcatcttccagcctccaagacctactatcccttctcctagttcttcttgtttagttgtgtaagccagaatcatggaacaatccaattgttttctcttggttccaggcttaaaaagttacaaacattgtctgctctgacacttttaaaatgtgtgcatatgcgtgggacatgtacacatatgtatgtgactctacgtgtcatggtgcagatgcacacatgaacgtatggacgtaggaggttgatatcagaagattttctccactaccttttaccttattcattgaagccagatccctcagcggaacccagagttgatagataagggactagtctagcttaccaacattttccaggtctttccagcctccactttgcaaatgctagaattacagtcaggatgccatacctatatcagaactctcatctccacactactacttgagtggtgagttattttaagtgctgagatattgctctagtccttggctcttttctgatggttaaaattctcatcacctgttcctgtgacacagaatcatggtttacacatgttagaaaaaatacagtatattcacaaacacacatttgtgtgccctttccacctggaaatgccttcttagtacaactatgggcttacattttacctacatgttaatttccaagagaatgtagatggaatctatctttggatgatgtaagcttctgactgattttagctttaacaaatttcaaacatatcatcccattgtggggcccattcctatcatttacttactctggttctcatacattaactgctttaattcttcatgcctgtttttcctctgacttataaaatttttaagcatgatataatatgtatcttctgatcagttcacattgaatttctagttcaataaataaataaacaacaaatggataactgagtgaatgctctcccattcctaggctcttggtaactcctgtctgtttgctttaatgtgctaactgctgacctcaccttctacgtaggctgctctgtcgatattctttgttatcattctcagccgtgtagtcctaagttttcattatttttgtctcctgtctaatatgaagcctttagtatcaatactcagttaaaataataggcctgacctctccatacatcctttgcttcagtcactgtgagcgctttgctagagctatactctgtatgcctgtgcatgtttccatcccgtttggaattggaatcatctcacagtgattcatattttagtctgatgcccttctctctaaccttgatgctgatctctgcatcatgttattcacatacccttttctatatttattacattttcagaaaatatcacagtgataagtgagtaaaaatggatattaatcacattgttgagaagcggcattaaagcaccctggcggactcttttgcatcatgtgtttgtctcccacactgatcctcatgttggctctctgatgaacatcagagactgtttgccctgaaattcatcttgggttccttatacctgctgtttccataaacgagtgccagtcatgtccaaagattaactaatgaaaagtttaaaaggaccaaatcagtattagtaaagcagtgtgcctaatagcaagccaacataggaaagagcatcacctttcatggttaagaataaagccactgccagctacattttaacatatgtttatgatatttccttgatagtcactattctggattcatgaaaaaagtgaggaaagattataggagaggtaaaatttaaatatagaaaaaagtactgtgttgagctcagttagtaattgtcctaatagttaacaatactgctgatcatcaaaaacacaattactgcttgcaaggatggtagagtttttatagttgttgtgctaagattagtaattagttcctagaagtatctagatgggaaatcttagtctattaaagaatggcagtgagtgctccaggactctgcacggtggtggcctgtgttcaatgtagaaggcttggtagtagaatgagcacctctgctgtagaaactacaaggtgaactggatgaatgagataataataagtcatttagagattggtgaatccaatgttatgagttgtgaaaacataatggatgaaagaaaattcaaacctgaatggaagggcatgtttagaaatgatgaatttagaagtaaggaagtaaggtccatgcagactactggagcctagatttgcaaagttttatgggaaagctgttgagaaaattaaagaaagactttgtgaatagaaaactcataggcctagcatagaatggcatgcctctacccacaatggatgttaacatctgcatactaatacttttttcctgtacttgtaggtaaccatttccactgattagtgggcacatgtgttataccgttggacgctgtttcacattctctttatgtctgggtgagggaactgtagatgtacattagtatgtatttgttgacacatctctgcatttacctgtctgtcaatgggactagtaggacatggaatttttcatgggcaagaactccgagtcaaagccgtgcccttggtgctgctgctgctgctgcaactgctgtagctttctcattttagtctgagggtacaggacatcttgttagttccaacctaactttggaaaatagaagttgtatccgatataattcagaaagacctgtcgaatgtttaccactgttctggtagccaatagatatagactctttaaaatatgtataattttccattgtacagccatagtctatatctcttttctgtctaaagacactgttacattattctaatgttccatgactcttggtaaattctgtcctgtaagaaatacctcttgctacgtgctacataactcagtgtctctaccccactcaagagacatattctgtcccaataggaatcatcagtatacttcaggcttcttgggaaaatggtctaccaccttaggtacttatttcagttgcaataattttctctactctattcattactgaccttcacagtcactctgtatattatttcttatgagggaggtcatatattttttgacctacagagagagagaaaaaaccctagaaacaataaactgaatttaaagttacttcatttacaaaagaccaaggcaagcagagcagacttatatttttaatctaagttcttttaccagtttaatttgatagtggaaattaattgcacaattcttaatatcactacagcacaactacaattaaaagatattctttataaccattttccatccctctcatacatatatcagggcacatactagtctgttcctgaaattttcattttcttcaacattgtgaaattatttcaaaagaggcaacagaaatctgtttgcatcctagtagtgttaactgaaacactatggtaagcacttaacagtgctgcatgtgtcttcctaaaaggtaaggaaagagatgcacttgccagagagaggagacgatgtagtgggctgttcagagatgcatgacaggtcttgcactaaggtgggcagtttctgttcctgtttaattttctttggtttgtatcatcctcatcatcccatccctgagatcaacaaaaggcaggctggtgttcgtgtgtatcaccccaagcagcactgaaatgagtgatacgatcaatcagatgacagcacgatgaaaacggatagagaaccactctatacagtcaaatagtgttgactaagcaaatactttcacagtatttaattagaggtcaatattgggagttactggttgacgtttccatgggaatgagctggattaatccttgtttgatattttgttattgcaaaattacaaaaattagtgagtatatatcaagctcttttaaaggagcatgagtatataatttactgtgagcttgcactaagtgcagagacaacgaaacattaagatgagttcactggtaaggaatgagggctttgtgagccactgtggccaagattttttgtctatgaaattgtttcccagatatccttgatccctaagtttcatagtcacctatgaaatgtgtctaatccttagtctccctgtggtggtttgaatgacagtggcccccacaggctcatctatttaagtctttgctctgcagtttgaagttgatagaacagtttgagaaggatctgcatagtggtcttgttggaggaggtgtggcctaactgaaggacatgtgtaactaaggatgggctttgaggtttcaaaagcccagactaggcctgtttttcttctcttcgtcttccacctttggatcagtatgaaagctctcaactacagctactcctccaacaccatgcctgctggctaccatgcttccaccatgatgttcatgggctcaccttctgaaactgtgcgcaagcccccagttaaatactgtctgttatgagctactttcttcatggtgtctcttaatagaaaagtaactaagacaccaccttagcccccagagagcaggaaacttcattgaagaaccttagccttcccacctcaaacctaggaggtattgccatgtaggtacaaacactttcacacccagacagggaaagccaattatagtatgtgacatacagaaaatgttaaaatccacaaactggccatggctgcaggttgctatagagtatatgaaactgattggctaatataatagaagacagctccggcagccagtgctgctccaggttcacaggcaaagatggagagtgtcctggcagagttcatatttcctatacgcctttgtggtctcagcatgtctccagtgtaaatacgcatgtgactgtggcctgtgcactcattcacacttcagggaggcctgtggtttccttttctccctccatcttagcagtgggccgcctgcaaccttttgatcaagctgactttgtacgttatatgactgaactccgctgtgccaaacatccttgaggaagttgacatttgtgtactttgaaagaaaaaaagagaaaagtgaatcccaactgcttcctcctgcccttttgattaagagaatggtaagccagcaggagaggtgctgcttttaacaagcaggggtgtgcggcaactgattggtatctttctttgaaaaaagtaggaaagattgatgttaaacaacactaatcagagttgattacagggactgaatgaattcattgatgggaaggagccatggttccagagacaacaaaagagattagataatagtcaggggaatcgtattgggactagtctgctcatcgctgacaaccaggaatccatgcctgtagctccttagccatttcttgaagtaggcattcgagagtagtaagtacagttcttgctctggcacatcccctgcactgtgcctgaatgcctcttactcttccttcgggccttagccctcccacgactaaagtagctcttcataccaatctttgtgggacttaacttttagctctagttcttcagcactagacaggtactgcactatctgacagtacctgtggcttcctcagtgggccacactctgccttgctctgtgccttttaaatctttccagttgcatttacctggtgtccctccccatcgactgtgatttatccagttccttccatccttcacgttccattgaaggcaccatctcctcaaaacttcctcatttattcagcttcttcattaaaaggcacagtcccacacctctgctctcccttggagattgatgctcaacttaattacaagtgcttatcactctatgttctaattagttggatatttatttttcctttttcttacaacacagaaatattttaaaacagagactgtgtctttcatcttgttattacaaatgctagcaaaatatttaggacatattaggcatttggttagaatgaatgaatgaatgaatgaatgaatgaatgaatgaatggaaaaaatccaatattcccttcatccctaatttttccttttgaaatcatctcctaaggtagaaacagaactcaggatggaaatctttgacaatatggatagcatactggttttctttttactagaattgtaaaggaacagagaaactgggaaatcaaacaggtgcttttatgcctcctccttttcctgatgtctacattgttacaggcagtactctgactacaacatgaggaaacctgtgggaaactgattaaagtagtgatgctctcatttctaccagaaagtgaggatgtggcttattaccaaatatgggttgctggtaaatgactattaattacaacctgctagtgaaggcaatttctcttttagggtcccctcaagtacttgatacacatcatcagctggatgtcacaatctgcccacattattaacctttctcacatactaaaaccatcacacaagtgccttagaagcttgataaatattacctaattagtaagaaatactaacttttaataatctcatatacttaaactcctcaaaaagtgtggttttctttttacatagcaacaagtggacatcccttgtttttcattcaacacccagaacagaccgtgagaaatcagcctaggccgctcaggagggctcacccagctctcaggctgagcatgttactgtcaccttagcatctgactgataattccttaggacatagaatggctccgctgttttatagcaccatagaattctacaaaacggaaaggggatgagtgggggtattttgtagtccaacgaggccaaataaagctttagcacactcaccaaatgttagctctgacagtggctaagactgatgggaaccctttggagctgagacaccatcctgtcttcaccaagccagtaaagatctctttaggtttttttgttttgggggttttgttttgttttgttttttgattttgttttttggttttttgtttggttggttttctttattagatatttttttatttacatttcaaatgttatcccctttcctagttttccctttgaaaatcccctatcccttcccccctccccctgctccctaacccacccagtcccattcctggtcctggcattcccctatactggggcatagaaccttcacaggaccaagggcctctcctcccatagatgactgtctaggccatcctctgctacatacacagctagagccacaagttccaccatgtgttttctttgattagtggtatagttccaaggagctctggggttactggttagttcatattgatgttccttctatggggcttcagtccccttcagctccctgggtatttctctaactccttcattggtgaccttgtgttccgtccaatggatgactgtgagcatctacttctgtatttgctaggcactggcagagcctcacaggagacagctatatcaggctcctgtcagcaagctcttgttggaatctgcctagtgactgggtttggtggttgtatatggggtggatccccaggtggggcagtctctgaatggtccctccttccatctcagctccaaactttgtctctgtaactccctccatgggtattttgttccccattctaagaaagatcaatatttgtcacatttcaaaagtaaatactagggctcagccagtaaactgcttgccatgctaacatgcctccctgagttcacgtccgcagaactcacataaagagccaggcaccatgcaagcacatctactccagctctctggaggtggaaataaaaggctcccaggagatgtctaggtgctctagacaaagggttgagctccaggtccatcgagagactctaaataagtcaaataggttgagagtgatggaggaagacaccttttattgacctctgatcttcacacatagacacgcatgcacagacagagagacagagacagagagactcatcaaaactgtatgaaaagccttgtctcttgtctctttccccccagttccttgtttgtcctgagcagcttccttatgtaatcagttcatgagctgattgctgatgtgaccttttggtggcctcttcagtcatgggtatgccttcagctcccctctcacagaggcagtccactcacggttttcagtcctgccttccaggctacatctcacagtctccactgtgttttggagatcattctggaccactgcatttttttgcatatttgttttggttgcatggtgttctgatatataaatatgttactgttcattctgctgtccccactgataaatttttcctatcatatcaagctgtactctgctgcatacatgatagatgtgcaggtttttctctgagacaaattttaaaggtataattattggttgaagggatgtacccttgtgaaattttgagaatgtgacccaaccagggttagatcttcttgtaccctattagtagtatccaaaaataccattaaaccccatgatttgatccaatcatgttgacagcaaatggtatctctgtgtagtgttaattttcatttttccattatctgctactaagcatcttttgatatagtcttctataggatagttcatctccttctttttctattgacttcaaatttttattcctactggcttcttgctatttatataatacagttaataataactatataagcttcagaatttcccatcttgtctatttttgaaaaatttgcttttggaattatttttttgaacatacagaaatttgcactctctttcgctcgcttttgtgtgtgtgtgtgtgtgtgtgtgtgtgtgtgtatctgtctgtctgactgtatgtgaaatttttcatgaaacatgctagcgtatgcctacatgtgggaggctgaggataactatgcatccaggagcagtatgggtttcctctaccatcattcttagatctctaacacacagacatatgactactgttcctgtaatagtaagcaaagttacttcatgagtttgggataactttaaagtattaagattggggagaggtttatacaaaaagcttttctccatacccagttaatgtttccttatccttctttactttgccttcattttaaaaatcctctttaacaacccttggagatgctggagatacaatgctgagtaaaaccacagggagacgcaatgcctactcaaaagctaactgtggaattcaataggacagggaaatgaataagtgcacatatcagaaacaggaagtacagtagagtactgaaaaggagagacaggctggccggagagtattgctgtgggtttgagaccagtctgagttacataaaaagtcttaggccagccaggtctacagaacaagactgttcctaaaaaagcaaaagaaaactacaactggattatatgaagcaaacaaggaagtgctgctgggaaagaggcatttttaagatgacaggaatgagaaactcctaacattcagcagggaccttcaagagacttattagagtgacccctgcagtggaggactgtctctgtccctggggtgtgaactagctatgtgactaataagtcatggcagcctttgtcacatgtgtctgtggcgtctaaccctgctcacgattcctctgtgagccactcttacgatccacctggaagcaaggctgaagattgttatcattgataatgaaggactagtgctgatatgattaggagctggtgaggttcttgtccaaatcctgtgatatgattaacctcaaaagatgaatcatggcgatcagctgaggagggatcattagataggactttgcctccaccactgatgtagcatctccctgtggagcctgaagaatctgtggtggagtgttctgctttgctgctgtctcttcagagggggagcagcgtggttgctgactgcactttcttcagactatgattactgacagcaatattctctgactgacacattcttccatgacccaagcctgctcacatccgcaaatgctgcctcactatccccttttgcagacaagatgactgagtatccctagcgagcaataacctttgtggttatgctgtttactctgcttaaaatgacttttttaatctatttttttgaaatactaagaatccttcaatacttagcctaaagcatgatccatctggaatctccatttactagccattttgtgaaaccatgaaccacatctgttttcatctgtttatttaaaggatctagctattttgctatcagttgtcactcatctttatctttataaataatataacatcaagaaaagagcatagaaataggaatataggcaagaggaaagtgaaggtaatttgagtatattctgttaactgcttatgacaaaatattaaatacaattcaggtgtgccttgtttgaacctttttagtcccagaggctctctgatggcttcctgaattcccagagtgtacagggaagagtatgtggagggatcatgggtcaagttcttcttttagaatgtatgagagtgattttgcgctaataaccccaggataactcataaaagtgtatcttactctctctctctctctctctctctctctctctccctctcaaccccccccccatataatagaattgaatacagtttcccacaataactctaaagataataaagtggagcaaaggctatgttaggacctcgtgcaatgttaggacctcgtttgcacaaggccctgggttagatgcctagtaccacctgcaatatcaaaactatgatataaaaacaggaagactaagtgtttaaggtcatccttgactacatagtgagttggagccagtgtgggctacctgagaccctgcttcatctcaacccactcccaagaaaaaaagatgagaaaattaatacatttaatttagcttttataccccaataagttttatttgctattttcaaacattactttttctcaaggtctgtttagcagatggtttattttataaactctattctttctagatatgttccataaataaaaggatgttctgagagcaagaaaagttaaggaattaacttatatggaagtctagatgtcctaaagtgcagcaggttgctggcatccggtgcattatgggagtataagcttcacccaagtcagtaacctgacacactcatatctgatgagaccaaagaaagaaaatagctcttcagtccccgagtcgggttcagttatgagttgaaggtgaagtcagaactatttaaggttttgttttatttataggcctcactattaagtgtaaggtttctaagaaagtggaagacagcgttcccagccccgaagcttctcacggaatgagtaagccagtgcaaggatcctcagtgcacatgactgagagttgtaacaaacatgcaaagtagagcacttgggacattgtgagcctggcctgatgggagttctctgtgggccagggcctcagtgaaggcctgctgatgcagaaatgtcccagtgagccttggaactggacaagagcaaaggaaattctcctggaaactgctgggataagttaggagttagcagaataaggaacctgtgggaaggcatcaaggaagacctaagagtattgccagcccacagacgactcccagcagtcccccaagacccagcctctgtctgaaccctgtctaccaccaggagccatcacaggtcccattgttttactgtgtaattgctctgcgattcgataatagaagtgcggcctatacattttcataatcacctccagagcacatccattattcaaaagaaaagcttgtgtgagaatgataatctttattttaggtatactaagtactgttatcatattagctcattgggttcccacaataaacctctttgataggtgctatccattgcagaggtaaggaaaatggagtcctcaagaaattttacattttatttggaatcctataaactgtactgtctcactttttatctcggtttctctctcttacacagagagagagagaggtgaggaggaaagagaggggagggagaagtgagggagaaacagagagagaacacatatgtgctacaggcatagtctaggttgagaagtccccaacactgaagtgatggatggtgtctagaagtgtgaatgggaatagcacatagagccttttcccacattccaaaccacctataggatggagaggctttttgttttttacccctgactgaaaagggagaaggcactttgcaaactagccacactctaccacaaatacaagaatattattacaggagaaattacaaggtctttttattttttagactttatgctcatccaactttctattaacaattgcatttagataacttatttttgagatgttcaaaaatattacatattaaagtttccagcatagaaaaagtaacaaaagaaaaccataccttatagccttgccagccaggtaactcaaacatatgattgaaaaacaacagaaaaaaaatacataagtagtatatattttatatgtatatatatatataagtatacctatatatgtgtttattatatgtgataatacacatatattaatatacttatatatttataagtatacttatatatatatgtacatatatatatatatatatatatatatatatatactttcatctatttatatatatgattggccctacaatatcttttaaaatacaagtgtcttctatatcacatcagaaaaaaatgtttatgtatttgccaatatataaatgttccctcatttatttaaataacagtgattatgccatatataatttcttacaattttaacatgtaattttttttgcccatctcaaatgacataatgggaaaattaacagcctttttagagcaattgttggattttgtcctaaaatagtcccaagcctctctgtttatggtatggtcacagaagaaaatactgtccatgaaagtacaaatgtatgtacatgtgtgaaatatcacaggaatttaccataattcttaatgcgatataacatgtcagggtggctacaggtgaagcagataatgtgtctttgtaatcctgggtggactatggactcacatggaagttggcggagttctggagagttttaatgctgtcgctgattacagtgtctaagattttactgcaattttcatctgagttaaaacagatttttgtcttcaaaataaaagccttttaaaaaaaataaaaaagagggggggggataattacttttcccatgtcagaaaatctgaatccttccattttatctcctaacatgagaaagaaaggcactaaaaaactggaaagttgaagcaaaaacaaaacctttgctgagtgttccagcttcagacttttattcttagagtgcccgatgagatcctaagcactcaaggcagagaggagatgcagatgcaaaagaatatttataccaaggcttactacttataattcttataattctagttaaaaagcagttgaggctttgagaagctattttgctgcagattgtttaaaatctgcccatagacttttcattaaagaagaattttgtttgtgggcattggtgtgattgatctaaataaatgtggaagttgtacatatctgatacagagaaataaatgaacaggcaaaccacattctaaccttgaaagtgtgactgcttttaatgacacaatgtattaaggtcaagagaaggtgccctcggcagatggaagactttgaaagtgaaaagccctcatttccatttaaaatgtgttgagtggcacatggcttctaaggaataagtagttgatacagttagaacctttcctcatgtctgttatcaggtgtcaagtcctacctttacctaatgcatttcccaaacagatgtttgcaatgggaggacggggcaaaagctgaaggggtaaacccagtaggtgtcacgcctctctgtgggacactggaaaaggaactgtcagagacacacccgaggcttggcaagcaatagattctgtacagccttgatttgtagcctttcatatccattaagatctgtttaagaggccattcctgtgattgtgtccggagttccttactatattttatctagaatttggtttctggctgaattcagcattatttgcatttgaacccatacttcattcaagaatagtttgtcagaactgttctgctatacgcatctcacttaactttttaaatgtacacaatgaaatgattaaaggtgctgccttcttaggtagcaccgtgcttctgggagacttgctctcacatcctttgtgaagatctttgattgagctttacagatgaggtgccatgtgccttcctgtcagctttatggaagcaattttttcatttctttacctacttctcattctgtgctctttcttcttgctcttccattctctctctgtttcatgaaaattcatttatctgtgacatttaaaggctctgtctgagaggtgtctggagctgtggccggctgtgtacatcaatagcttcttagggtctggcactctgtcaatatttgggggccttgataaccgcacttaactgcagagcctgccagccatcatgctcttagtgcctctggaacaagtccggatgagtggatattagcatgtcaggtctttcacaactggcgacatgtggtagacagtatgcaagcatcttccgtgtgccttctgcacctttcagtgctccttgtttatatgatgtcattttctactatatataaaacatgggtcttctgaaggtactcttgtcaaaaccaaaataaaagacatcattgtacaatccgggtgagataatgatatattgacattatatttttaagctccgttctaacactgaatcatatattagttaattttattatatgtaaattacatttttaaagggctgactttaaaacccaaaattatgtgatatttggtccagagttattgctgtcttataatataaatatattttatcacatatttctaaagctgatgcttctttatgaagcatctatccttagtgttttacatgttttgatagatatttatctacatgaaaaagagacattagtgaatttgagagataagtctgtttgataaaattcaagctatatgcagtttcaaatattttgcagttgcctttgctgtttaatcaaaatgggtcatttatttatacattgaatcatgaagatatcattatatcaactttcacatgacctatcttaaattgtacagtaaccttttaaggtctgtgagagagagcagaattagtgtgacatcttagttattgaactattatgtattactggcccattatgtaacctttggatattgcttgaggtgagattacttcaggaattgaactttcaagaaggggatgaagaagataggagttgaacagatgtcagtcctttcctagatatttatttacaacctaatagaagtatgattgactttgccaaattgcaaaggttttaggtcatgttcagatgaaataatgtaggtttctagctatccaagagaataattgccttaagtccttaatgctctttgatggactcatgaaaagaccttccctggacccatttgaccaccataattcctaaattgaatggattcagttcttgctcagttttgattttcagttcatgtcccttacatagtactcacacctgctataatacaccatagattttaaagtgacttttaataatactgaaaagaaatgcctaagaaacagctttagtacatacagttttcagtacaattgaagataaacctggaacctctgggagcgttcgtgatattttaggatgggcagtttctgaacctactttgtaattatagagagctaagtgtatctcaccagttataatgtttacaaagtcataattgtttgaatgcagctagctcttatccttggcaataagaagatccgtcaaaaggaaggagggtgtctttaaagaggcagcaagaatggacaagggaaaatctggccactgaaaatctagcaatataagacagacctgaaatttcaagaataaaaagacataaatgttgagctaaatgtaagagaagcacttacacatggatttgtgacatggctcgcaatttctagttaatagataatagaagataacaacatacccaacttctactgaagaaacacacttgatctcttgcctgaatttatacttaaattttgtgatctcagagaggaggtcatatatgcactacacatgcacacaaaacattaactataatgcattttgggatgatttattatttttttattattatttctcaaggtataacagagaatatttttagcatcttctgtggatgacatggaaacttgtctcttttgttgctactaaccatcctctagctgtccactgtggacatcagagtggacgcagaaagaatagtgtaaaaaaaagaacagtgtgaaattccaagactgtgtctgtccttccctcagcagaggaggcggctgtgattcacagctctggagagttctgctaaaaaagaaagagctgtttccttccttcccatgtaacacctgaagcgatccttctaagcgtctgtgtaatgcaagctggaatcggtcttgatgtagaaatgaactcactcccaaagaggagcacatagattgccagttatgtttttctttactcaggaatctctctgtttgggggggggggtcaacaaatgatcactactggtgattaattatgaatgaataatttattgcaattcccatccctgtcccacttgagtcaacttgccacacagaaggctcccaaacaagaggtgttgtcactacttacagaatgttttctagactcatctctattttaatagaagtttttagtaaaattttgatgcacatactgcaaaaatcgaggtcactgcccttgttctctttgaagaaacaagctttggaaacagccatatacttctgtataataaatgtcctctgtctgcaataattatatagtttgtcatttctcatgatgtcatagtggcccacaagctacttgcttagccagaagttggagtgctgtgaccagagcacagaatatgaaggtagctctgtgaatctcttagaattataagctaggaatagaattgattaggtattcacaagaataaataaggttgagagaaaatgtgtaacatctcatattctcattacaaattataggtttttgcagaaagaaactgtattaaaaatatactactccaatctaaaatagagaaaacagtagatcaaaataagtaatctcttttctgaaaagttccctgtaagtgaaacaaatagcagcttattaatgacattgtttttatatccaacacagttttaaaatgctagtctaaaattaacctgttgcatagatggtgcaatgtgaatgattattcacgaagatagcccaagttctgcctcatagtttgggaagatggtactccacagacatctttactgtctcctctccaccaaaaagaagcctcctttttgggaccatgcatctcagcacagccatttaacacctctaattgcaagctgaagacatagaaatctaattcccattgtttgatctctccctggaaagttctggtaaaaccactttgccagttcttaagtcccagcaggacaggaggcctcactgatctgtcatcttttcttctttggctttgcttccggtgttttgtttttggttttgttgttttgtattttttttttcagaaacagagactttctctatagtctgtgcttgcctggagctcaccatgtgacccaaatagcttcaaactcatggcagtcctcctgcttcagcctcttaaatattaagattacaggcatgagtccaaaacctaccttgtcttcgttattggcccagagctctactggaccagggcagtgttattgttatgtattacataactagccaagctacttttgatgatgacaaggggaagatttctaacactcttatttcattccaagctttttgaaattctcaaggaatcacagtcaatatggagaaattcggaagtaaaagactggccactgaaggcatcctgaattctggtgtgcctccgaatgatctagaaacatgtttccagtattggcaagcccagtatagtgtaaatcattaacaaagttagggcaggtttacttcaaatttatcttttaagaaatagatatagaagaataatgtaaaactctgatcaacagcgtgccactgtactttctcaatgtttgcaaagcactactccattgggaactgaacttggaagaatgatgtatatttttaaatttcgattttctttatgcaagatccactgttattcgggcaaaaagaaaatgtcagaaaacatcagaacttttaaatgtatttagccagggtgaaggcagaagaagtaccaccaagtttttgaacggaagtaatcatgttaccatcatttcctgtaaagctgagttacatacaaaaattaggcccttgtgaatttttggctagtgtgcattttttctttatggggttttggttttggttttggttcttaactgtaatagacttttaaggaaaatttcatcacatttcaacttagtttttgatgtcatcagtcaatgtcaatgacccatcatcattcctgtgacattaacgtatttttaatttacctccaaaaatgtaattagaggaaagacagccttaatgcaagtgttttaaagtgctacacgctttcccctgcctagtacttctctagaaactaaagataaacaggtaaatacatcaccatcactaaaggatgctcacagactggtgggagaaacagcatacaaacagtaattacaatatgcactagattgattatggaagaatgtgtgaggggttgtatcgatctgcctggacagttctggctaagtctttagtattgatttaattaccatagggtcctctcccttttaaaagtgttcctacctggacagttaactacatggacaccttctaaattgctatatcaattaaacatagctgatgttgcctggaagaatttctacagaatagggaataaatttaaaaggttgagaagacattgccaaatgtaacgaaaagagacaggggataggctgactaatcttcattcctctcaggcttgggagagaagtgcagtggagtttgactcatgttggacgggggtgacaaaacaggacagtctatacccagctgtaattgtatattgtgcacagggttgttgagcagagtctgagtgtcattggtcaccaggtcatgaaacaaaccagtcactggctacctagcattcacagccacatcatttccttgttagcttaacgattctacacatagggaagtcttctaaactagatgtgaaggattctgaagtggtaaatgtaaatttagcattaaagaggaaaaaaaacgtagaccactttgtgtttcattctaaacatactttaaaaagccatcagaccatgcactgaagatgacttggagctcattctttgccatacaaagaaaacaacctctagattgtaatattcaggacgcatgcctcactccaatgcttgggcacaagctccctttaagatgggcttactgtaaagtctttcttaccagtttgatttgtatacctctaagcccttcgcaacctgtgcattaggacccctctgggggtcacatatcagatatcctgtgtatcagatatttacattaagattcataacaaaaacaaaattacgattaaatttttatggttggagtcaccgcaatatgaggagctgtgttaaagggtcacagcattaggaaagctgttagagaattgttactctaaatcatatacaaataggatggagtctagcataggagaaacacagcagacaaccaaacaggagacggcctatgcaaagtttaaagttcagctggttttacggatcattgtaacaatgagatgagtgtctaccccttcccacttcctgagagaagtagtgaagaggtgacagtaagagactccttagggataaccttgggtaatctaagcctgtcgacacgcagagggagaaaggaaatggcatagatacaagctgatgccatgagacactgcactcacagttaatctgggatgagcttggaaccagttacctgctgtctagtgcacagaagcacgattcagtccaggctggaaaagaaatggcatcaggatgaagcttagctttcccagggcccaagaatagccatagcataccaaagccagaatgctgtaacttgcctttctagctacagttttgaattacatttaaaatagtttccaatgaaccaaagagaagtgttgtaaagatactagaaatggacttaattcaaatatatatgctgcagatgtaaagaaaactagcttcaaatctctacagcttatattcaactaaatacaatgctgtataatactatataattaatataagatctttacacctttaaattttaattcttctattaaaaaatgagatctaaataccattgggatgcgcaaagatgtataaatgtataacatggcagaggattattaaaaatatgtcctaatgttttaagtgtgtatttgtgcacatgcgtgcatgtgtgtgtgtgtgtgtgtgtgtgtgtgtgtgtgtgtgtgtgtgcatgcgcacgcaaaggtgcccacagagatcaaagagggatattgaatacccaggaggtagagttacaggtagttgagaatcatacaacattggtgccaagatccaaataggtactctgtccagtctcttaaccattgagccatctctcctgccccagcaataagtgtttactccaacagggatcactataagtttctttcactgtgttgtagctacctggtctgagttctgcttctgtttctacctctcgtttccccttgggtcccacttttgacctctgtccccaggtactaagtctctgtctctgcttgaaagactgttgctatgttctttaagagcgatcctcactattatttataaattcaataccagctcatagtctatatgtgacatttagagagtgctgttcttctcctacagttctaaaggatagtgctaatattaaggtttgcatgtaagtggagtaggggctggggactccattatgattaccagcttcttcgtgggaaacaaaaatgacttgccaaaagtcacttggaagccccaggtggggaatgttgaaatttttatgagaagatctagaattcttgagtctgagtccaccaggggtccatttactctgaaaacagcagcacaaggatgatcccaagtgtaactttggtattctgttactgcttttctatcacacagataaaatgttgtcttgcctgtgctggtcctcctgttacctatggcaagcaggaggaaggcgctgtaaattccctgctcaacagccaaagctagccttgtcaccaaagctatcgtgtgttagatcacacgtcagtgtctgcagtcgagccaggcctggtgtctcaggtctacttgttaccagtgagtttatgtgccttgaagcatatgtccttgatatatgatcccagagcaaaggagcaaggtatttcaagctggccacaattttattgactctcacaggcttgctttgtagtcattccaatacactagatgagaaatttctgatgttccacactatcccgtcctcaggactccatttcataattcagtgtccagcaaaacaactccagtgcttttgtgtgacactgtgaccatggggataaataattgcttagtaattctctttgaggcacaaaatgctaaacatggaggaaccatttccccttaatgggagccagaaatcctgtgagtgcttgaaatggtattcacaagtctgaatggtaaacagagaaaaacaggagcgcaccagttgcacaaatgactcgcttgtcacagacttgtcattgcggtaatctaacatttcgttcacaaaacccgatgggaagtacagaacaaacaggccctgctgacggtttggctccactaagccttcctccaagcccaagcatctgcagcatcttcctgtcctagacccttgatctgccgaagtgagtcgacactgtccacaggaatgaagtgtttgactgttgcattaacaagtcgatgacaagcaagttactcaggcagttgaatgctgctgcttttagcaggctgccattttgaccttcactttatcataaacaagaaccctaacaaagcagagcacccaggagatatcaggattgttgccacaggcctgtgctgattaacgaagactgcctgtctggggcttaggttataatggtattgtgggcatagcagacagctctgtgggagttatggaagatgattcctggtagaacattaatgttatgagcacaattgaactgtcccaaggattgcttttgtggaggccaagtatatgtaaggaaattcactgtctcctgttttccctccctacaaacataggtgtgcacacatgaatttatgctttatataacgttactatttggaaaatatatgtagaaactcttacatgccagcttttacacatagtatttgccacttcttgtgttctttctattggtaagctcccctaccctccttctcattcagggtaatatctacaggtatttaaactgagtcagagccacacgtgtgtctcctactgtctacctgtacctctgttagcctccccacactcaatccagtagccctccaagtcatcatcagtttatttaccacacagtctaccagcagggagtgctcatacactgtgcagtctccacattctctgtttgaggagcctcctccccttgggaacccatccttagtgcttcctgtcaagtgggccaagagctgtcttcacacagagcctggctgtagtcagagccttgcctgtcccctagtccccagggttcagctttgttggtgctacaggatatcatcacttaggacaatggcacatttgctaagactattcccgtattcagacagctgagcttctcttatgcaccaaggtgtcaggtgccctgtatcccattagaccctctaggtgtattcaagggacactgatagtgtctgctgtgcttcagacattccatgaaaggctttcattcgtaggcttattttctggctgatagcacaggtacttttattttcagaagtcttttgtaaaatggttatcattgtttagccatgagaaccaattttctggccaacaccatggtaggccataaccttctttgagacttggaaaattgagcacagagctgtctcccaggtgaaatgttttgatctcatccaaatatctcctgctgtaatctatacctcgactctgtggacctcctacttcagaggacaggtgggtgggaagatgtaagaagagggtccattctgtgtataattacaatactgtctctggaaaaggaaatgggggcagcatgaaggagtaattcaaagattctaaaagaaaatacgtgaatgaaaatttgaattttaaatgtagttttactcacttttttgtttttgtttcttttttaaagttcctaataggatttccataatgattttgtgttttcttaatagaacttaaatggaagagaaatgatatgctatatttaattcagaaaaaaataaaaatcctttttatgggaactcttccttttcctatgcattagggaatagaaaatggaagagaggaaggcaaggatggggcatggaggtggggagatttcttcctcttcagagaaagagctcactagtgtggtatatgtatgtacttattttaatgttcatttacttatctcattattttaacaaagaaaagaaatgtctcctgcactggagtaatgtcattgggctcagaattttaggacaaaaatgagttttttactaggatgactttctgtctttctcccacttagcaaatgtgtgtatggatgctaggcaccaaatatgttaataaatgaaccgtgcacacaagatcgggagcagaacaaggctctaagccaacgtctaaattttagtccaggcaactccccctcagagattatatacttttagtcttattttaaacaaaaagttttcttttaattttatgcatcactgtgcttaaatggaacaggacatgtgctagtgtgataactgggacttcatacaagctgtgctacctaaggaacatacatgagccatctcaccatctttattttatagttctactttctttgtgtagtatttagaagagcttttattatttccattaacttttcccctgacttagtagagttagttcaaagaagcactctattcccatcttaaagctgaaaacatattttaaatgggtctgtttctttaataactgttcacttaagtaggtcatagtctctgattcttggagattttttaaaaatccaaataatgaaaatctgttttatatttccacttttagccatgtttgagttgtaattgttagtttcgcaaagtgctgattaagtcagaacatctacttttgtttgtttgggttctctttgtttaacaagatcaacgaaacgtgcatttaccttttcacagttatggtaactatatactaattttttatttatgcaaaactattttttaagagttttttgtttcgtttctgtttttgcatctccaaacatctgtaccgtagctagtgaggcgagtagcaggggtagctggcagttttcctcctcttgtaagagaactggctgaaataaaaccttgctttccatatggccggcttgcagggcaccactgagaaggtattgtgtcttgttttctgaaagcaaaggtgaaactcatgagcacatagcagtgctggtgccagatcacctgttgattagtgtcaggaaggcgcttggcaatccacgtcaattgctgggaagcctagatggatgggcctggtttgcggggagcattggtctgtaccagaagcatctgcttccggtcactcactcaggaaagcctaagaggcttcgtgtggatagaagtaaacggaaaattttgctcatgattcaatgaaaccgctgctgtataaaatgcttgttaattggtgaaatattggtttctattgtgagaaatggagagaaggggatgcttgccttcatatgcctttggattaaggaaggcagtggtctcagagttagacttctgtaatgtaaactatttcaaatacataatggtataaagaatcatctgctacacaagaattccgagcccaggttagatgggattttggaatttggcatgttcatttctaaacttgtttctatgttcttagtctgttagtagttgcagagaagcggacaattcgctctgtagaataatgaactaaagcatctatctgtgtgacagagcctaatccacagtaagccacatggcagagcccaggggagccctccattccttcttgcagctgatagagtcttcatggctttagcaaaaggccaaaaacaggcagtgcttttctgactcctattaccatgagtgaggtactttttcaatcatatattacagcttgtataaaaatgaattattctagctattatccctaaacttaactaatcaactctctcatcattaggcataatttttaatgtttcccattggcaaacaagttcacatttttctgtatgtaaatatggagatggttaaacattaagacgtctgtgtcaaagcttactgagttttatctggagaaagctctttagaaagcgctagtgtctgctcatgctgtccccagcaacctcaaagtgttctcaagagtcacaacctaagtgggcagacctttgaccggcttctcaccaatagaagcttgagcagtgcctcacttggttttactttctctatacatctttggcatttcctttatgtgttgtttccttgtattctatgcccatttttctacaaggctttaagttttgcttttgttaacttcagtgaactctgttgttgtcatgttcttggtgatgttgcaatagggtgtccacatctttgttcctttgacccataaagattgctggtatcctggccaatttgtaattcagcttttccatgtttagcagaaacttttctaacttctggttttaatgcagttaaccttactgatattttcctttagagttggtgtgacttagacatcctgatttcttccactggcttgctgttgtagttctgttgcttttcagaaagggtcttgctctggaggcctccaacctgagatcctcctgcctcagcatatcaaatactgtggttctatgtatgacagccaaacccagcctttcttctttctggtagtttagttttgtcttctatatttaattcttacaggtacacatggatgcttatggatcagtttgccatatttcaacttctgcttttgctttatgagatttattttccaaatgaattccctgaaattacctgccaggtcatttaactttctctgtacaattgtgctatcttaagttatccaaactaattcattttactgtcaatgaatttgcttaaacttcttaatattttgattgatttccatcttattcacttattttttattgtttttatttaatactttactgtttcctttatagaatttactacattttatttaacatcccaggatatttacgttaaggtcattatgatattattctttaagataaaattcatctcaacagaaggagattgacattttttggctgtttccctaccattggctttcttgatgcactttagaatttcatcttgaaattagtgctaatcattggctcttctttttcctttctttctttgtttttgattggttggttggttggttggttggttcacaaatgcctgagtgatgactttgcagttccctctacctggatctttgagctcttgctgtctatgtgaatctttacagtgagaagttgaagtgtcctctccaaaggaatattttatcataagacagagtcttactctcctctcacagggttagagtcctgtttggtaactaggtgatagttagaccattatttggcaccttcttgctgtagtaaggtaggaacaggtccactgcctgtaagtatccttgactccatcactcccaagagcagaggatccagccatttgtctgtgcatctgaatttcatgtctgcattcttgtgatttttagcaccattctcattaattcatttcatttctctatataaataatcatcttttaaaatctatgccctttgtttttcttattttatattatattgcatgctttgctgacagtacatcacagaaaacagtgctttgagttatttatatttttataaagaatatatgtggtttatctcaaaaagtgtgtttcatgttgtttgtgctttggtttctttctctctgtctctttctctctgtctctctgtctctctgtctctctctctctctctctctctgtctctctctctctccctttttcccttcctccctcctctttcttttctctgttcctctttccatgtatttctcttttggactgtaactagtttattttgtttattatcaatctaacaattttccaatttttaaaacttaatgtattgttcaagtaacaattactgttatttttcttttaaaaaatttcaaggctatttttaattaaatataaactgttgaagttgtacactgtataaagtgagaaatttcaaatacttgttctttatttctctcttttttttctttttttattagatattttcttcatttacatttcaaatgctatccggaagtcccctataccctgctccccaccaccaccacccccactcccatgacctggccctggagtcccctgtactgggcactttatttctcttttaccacccagttctctttgttgctgctggtgatgctgctgtcagctataggatagtaatttttactagtgcatcagtagagaagataatcaatctgaaactgattggtcatgtgtttagggtagtaaagagttcctaacacaaggcagttgtttaatacttagagagttgaatgagttgagtatgtcatgtttatctgtgcacacaatgaaagaagccatagcttaggtatctttagaatcttcctctaatactgactcaatcttttcttgaaaacttcaattgtgaccaactttacatcatataatggataaatactctttttatttcttttgtaaagcaagcacatgctttgtgactgactcttgtataatcaatggctagaaggtcatgtgctccttcaacattgttccttcacaactctttttatatttacccctttcttcctgtatccctgcccctcaaataacaactacagttggcaaatcctgttctcaaatcagtaactgctattaaatttccttaaatgtgaagtagtaattaaatagcaataattatatcatattgaatggctattagtctgtgaccttccaaaatagttcatgttgtttactttttaaatgaaagcattttaaagtggttcacattgtttattttaagagtaagcctttaaaatttctagatatagtcagtacaataatgcacatgtgtcttcttagaaaatgaactttctcattgatataattaagactcttaataatgacttgcaacatgctagaatcaaaacaccaacctttttgtcataccaaaacaggttacctaaaacaatgcagagtgaaaagggaaaagccaagtataaactgggtcatttgttgatgtgcaaattttatggaaattttaatgacacatttgattgatttatgagacatacatattatttgtattataagaacactcaaaccttctatgtagcttgatttttaacaatcttttaaacatagtaacagattgaaattaaactgtcttcctagctgcttctattctttaaattacaaaagtgatttttattattctcttaaagccaatgaactggcactcagaaaactttctttctagtctcggttcactccttgatctctctgaccatgagtaattcacagaactcattgcgtcattttctcttaacaaatgttgagagttggaaaagactaaagcctttcactatcttatgtcctagtattttgtcttttgtctgcttatgcatatgcagaagtgcccacatataataacttaacctcatttagattccacttagcaatgacagaagctggtcaaccagacccataaggaaatagccagtaatatggtgaactttcctcatcaaatatagctgatgagaaactgggaaatactgtaagtacttaatcaggaaagcattatattttcaaaggtactttggggcattggagtgcagaatgagggacagaggaagaaatctaaaaacagccttgatcaggacacagttcagggcaaggtaagaagagttcagaacacagtgaaatagtcaatcataaggcagaagcagaagtcataaagatgctgagataggtcttgttttcaaaaagaacagccaagaaaaacattaaaaaacaaagaaaatagacatacagatgtctagtagtcaacaagacaaagtatgataacttactagcactcaaagacatgattgattttgaaaactaaatttcagtgctggtaagtatgcaataaaacagatgttcatatagagactagtgagcaatagtgtcaaaggttctgtaagataatatgacatcttacaagaacctttcatcagaaatacctctctaccccaacagtcttccttctgtctttccatctgttgaaaacagagtctcatacccagatctgtgcacaaagcattaatcataatggcatacgaaagaaaaagaaacataaccctaaatattcaaaatctaaagaattatcacataagtgatagaaagtccatatgcagttcgcatattaagtaaatatgaattatgttgttcttaaacatgtttttatgagttttaaactggggagtacttatgatgtaatgagactgaaaatcctcacacacaaagagacaaatgtatatatccatcccaaattacaaaataaacatctgtttctgggatggagacaggcattaaactatggagagcagttacctctatatgacagaattgagagaaatttcatttgtcctttttcttcaactttccagaagttccaaaaattctacaataatgtggaaaataagagttttaagcacacagcaaataatctaaataatgaatcacaaatcctacagtaactcaatctaaagaatgaatacatgtctaatcccagctaatcatcttctgattagtggagtactagttttcagtttgctgagcctgtaccacattattttactctcattgcctattactcttttgcatctctttttcttttggatctttctatatgatcggtcttcaagttagcattcgtttttgttaaatggaggatgggttgcgcaagtatgcatgcaccatgacacacatgtggaggtcaaaagacaactttcaagaatcacttctctccttccactgtgtggattccagagtttgaactcaggtccccaaccttggtgtcaaaagcactgacccatcctgcaggctgccaccatgacattctagtactgaattttctgtacagcctcattgtcctcagtcttgtctgccattcatatgcccaaaccacacttacatgcgtgtaaaattatcttacacaaagggaagtgcatagcctagattacccaacgtgtctccaattgtcttcaacttctaaatttctcttattatataaaaaagtgttaacctaataatagcattttgagtaattgaaacagatgaaaatgaagtagaggatagtcaatatgtcactgtagaataattttattgggtggaataaagtactgctgataaatttattaggcaccctcttcaagaatagactctcggccggctgctctctgtaaaaatgaataaacataacaacttacttggctctgtacccagaaatttggccgaaaaagaaacccagttggaaagaatgaaccagataaagttttatcagttgaaaatacacaagaaacttagtctgcctcctttctaacaaaattgtataagtaaaaatgcaatctgctttaaaatccgaattccttacactagccaatggcaaagtactaaaacatctaaaagtttccagacctcaccctctttcccttctgccaggaaagtgaacagctctccagcctcccctggctggtcctgttgactcaggaccattcagacaaagctcatctcatttgtagaaccgtaaatcgagtgaaggtgaggctatgactgttgcctcaaagtctgacaaactatatgattagtgagcaaactgaggaaggattagcaatggagttttgatgactttagtgccaattactaatctaagaataaagtcactgtgtacagccttgtcccatgaccaacctaagtagccagttgcttttagttagaggatagtaagtgaacaataaaggaaatatttttctgcaaagctgtaggttaaagtagtatagttcttaagagcttttagatttttaatttagtgacttctgatcattgaggctttttaatcactgtgatgcccaggagttgctaaatatctttgagtctcaagtttctcatctgaaagatgggaagaacaataatcctgtctcacagctgttaccctggagatcacctgagagatagtgcgtattgaacacatcatgcctggctaagctcttggccccggagtcagggtgtttttctggcacacatatcttgactactggatctgaccctctgagcaggactcttacttatcctctaacttccacactggagggatggaagggaaaaaagagagctctgaacccaaaagatgttagttgctttgctctgaggtgagaccctgaaatatgtctttgtagcaggttccctcaacagtcctgacgcaactggtctatagacaggtgccaggaaacacgggcatcataaccatataccagctccagccctctggcatcttcctaagcatttgccttgcccgttgttaggtggctctgctagagaaacatttctgccccaccttcccactccaccccactaaagacagaagagaagaatagggaagacagagtcaattgagaaaattgactggatatggcaaattatcagttattttgtattatttggactaatgatctgcattagtccaaaagtgaactgacttgagaggaaagcttgaactttataacaatagattttccccgagctggaaaggctgactagagtaaaggctagctcctgcttttttgttttgtttttgtttttgtttttttatggaattgctatctatagaacttagatgaattagcacgattgaagtgcaaagtgttaaatgcacgcttcggtttaggcagtgcatttgcacattgaagtaattagggtgtatttaaaagcattctgcttgcaatactttgttctccatttcctacaaatcaaattagtgaggggtagatttgatttttttacatcattttgaaaatattttctttttctttttttaatttccttagtattacattttttacaaagttcaaaacacaaccaactgtgactaaattcataaaaaacaaaacaaaaagtccaaagtacaagaaaatgaaaaacagcaccaagtgctgtgcagtggggcaatgcagatcatacctcacaaaagtaactgtaataatataccttatccatgtctgatcaattaataacaaatacttaggttgcaaatagctctttcacattgagtgagaacctcaaatttaattattcatctcaatgcaaatacacatgagaagagacccaggtctacttagaaatatctagtcatctctcatctccaccgtgcggtgtgcagtggatgccatgagtgaacgtgaagaaagagcagaaaggctgcttttcttgcgtgctaaaaaagcattcaagcaagattatttatttttcaaataacatttgatttgtggaagcaacagttatggaactctgtagcataaacaaagacagatgaggtaaagccccagtttgaatactgagttacccttggtaaataacttgacctctccgtgcctccgttctcacctctgtaaagggaagtaacagtggctgtgactggagttgttgcagcatgtggtactgtatttgaaacacttaatacatgttcagcatgtgacagttattaattcaggaaatagagatgaactgagaatattccatgattgtatttttcagaggctatttatgtggaacacaaattttagggttagaatttatcaatattcctagagaaggaagtgattattttattatcatcttttcttacccccagatagttttctttgttgaaaattaaggatcccaaatacatattgaacaatatcctttatattattgaatgggtagacctctccaatacaattattatcatattattttgttgaggataaacaggactttgggctggatcagatcagatatatgcagtctctgctataatcttaatgttgttattgtccaagaagaaagagagagagagagagagagagagagagaaaacaatgaaattgtttccaccataggaaacaggcatggtgccctgtttaagccttcgtcaaatatagaaaatgttcattgtttgtggaataaatgagaataacaaaatactaagaaaatatcttcatgacataaagaagctactaaaagacagtagtatatgtatgttattagagtgcactcagaacttgcctggtcatcaatcctctggttatgttggcctcagatgagatgatagccatttttattaagagctactagttcttagctggaagtagataagccagaagagaaaactgaccttgactcagtgggagccatggaatatcagctagaagaaaccatgggattttctaatccaagagcctcatttcccagctgaacaaactgaatggtgccaaaacactgggtggctaagtttgttggtacttagactagagtttcctgattctggtccagttcattttaaaatgtaccatgctacatttatgttccccagctgcctgcctcctggtggtttccatatgcccacaaaggctgttgctcctgtgagcaaagcagtgcaggggagcatccagcagcatctctgatgagaatcgcctcatgtgctactgcagtctccctgctgcctgaaagtttacagtaaagagatgtttcactcttaagtttgtaacttctcatttaaaattacagaatattaggttatcattaataatcaacaactgataacaagtttctgcaggaccttttccagtgaccagtagatagagttagaggggatggggaacaaagaacattcatcatttgaagaaagtctgaaggaaggctttattcacagcagttacaccagagaaggcacagtcaggtgggatacagcagtggggacagaaccccagcaagtgcacaaaagatgtgtaccttgcctggcagtggtggcgcatgcctttaatcccaacacttgggaggaagaggcaggcagatctctaagtttgaggacagcctggtctacagagtgagttccaggacagccagggctacacagagataccctgtctcgaaggaaaaacaaaaaaacaaaaaacaaaaacaaaacaaaacaaaacaaaatcaaaacatgtgtcatgtgtaccttgtaagagcaaaaaggataagatgtaaagaagtgggagggttggggcagtgacctactgcatggagacttagccatttggtctttattcttctgtctttgtgactcctttgctcggtggagaagtctcgggctcacgttgttgtacccttttataatattactactgtcgagttatttcaagaataccttgagtcaagtattaatgacatcagtgagaagagaagcccagtgtttggtagctaaccatcgtccctcccacctaaagagttggggggagcagggtagttttgatggctggtgatgctgaggtaaactggcacacgggatttttataagtgactttcccatgcgccactgaatctgtgtcttaggctttagttgtataccagctgtgcatgcaaaatctcataattattcttactgtattaagcattttatagcaattttagctctaaaatgctatgcaatagtttttatgcaagtgtaccagacatgtaagctgttccaatgaaaacatttcctttcttttagacacatggttttaggtttccaaacttagctttttgcattgatggaagaatctttaagacagacaccaggttttttctttttcttgtcttttggggggctgcagtgggatgcaggcggtgggggagggggcagttggattgtcttacacatattttactcttttaaacagcctcatcggaaaaggagcatttcgctgattagataatgctggtgttacagtgttgctgcagaatgctagctcgtccccagtctgccccatctatggaggaaggaaccagagaggaagctagaatgatctctgcatccttccaggatacagtggcaaacaggcaggaagggcttgggcttaacctctctgcagaaggctgagccctttaacactgctgagcatgccactgagccctgcagtggcaagtgttgggcctgagcccaaagctgggatggagtttgaacccttggcattctggcccagggccaagtactatcaatggaaccccactgacacctttagttattcttcctagattaggatagtaatttacttgtctctttgattttaagtgtctggttttgtttccagatgcctcccagctcatctgtattccaggggtttcaaaagactttaacctcattggttctttcctttgtcaattccatttggtgaacacaggagggatatagaaactagagaggacaagggagggctgtgtgtgtgtgtgtgtgtgtgtgtgtgtgtgtgtgagagagagagagagagagagagagagagagagagagagagagagagagagaggtaaagcatatggggagggcttggtgaggctgcagaaataaatgaaaggcattcactttcagcatatcagctattataccagagcaagtcagggtggaacttaagaggtgatgtgtaggacagtgtagtgaaaatgctattcgatgggttcatgtggaaaagccctctaaccagcagtaatctctggctctctgaaatgattgcagtatatgaaagagatggagaaaccatagaaattgtatcctaatgccaatagggtaacagctcttggattttaacatgcaatagagaaaaggcatctatgcatgggtgtcatccatgtttacaagggcctggctagcactgtttattgattttattgcaattttccccaggaccctgtagatagataattactggaaatgtccatcattagcacaacaacaaatacaaccactgttctaagaaaaagattcacataggtccctgcgagcaactatcaattggcgaggaggagagtcacacaataaacatgtacagctataactccaggcaaacacacacactcaacaccctctgtagccattgcactgagaaaatacacacagccccctgtgcagccatcacacatcaggaaaacacacacacgacacccctatgcaaccatcacaccaggcaagagcagagacataaaatgctaagtcaataggaatgaacagctcataaaagcctactggaatagatcacatcacagccaggtacatctgttctcagcactaaccattatcgttagcttaaaatgcttaaaatcactgcgcatcctcaggtctagggacagattattccaaaaagattctgctaaatagatttggcaatgcagtgaaggggacctccactacattaaagtgatgcattttgcatctcaaaggctgtcaactgtatttagagggattgtgtgattgaagaacaatgctccaggacaggatagcaattttttctggcccttctaaatctgaaggtgatttttaccccaagttgagctaagtgtgcaattgaattgggtagctctccaactgggaggtggctaataaaagcagaattgaaactagctttcaagttgtgctgcaaaggaagccactgcatcctgttttaagctggaactctcaggtgggatgtcctctgaaaggtcttcctgaggtcagacttcaagccaccaacaagagctaaataagtagtaactactgtccttgctccacacgcctgcatgccccttagggggaataaaggaaccacctcctacttcttttaccaatgccttctctttatcctcttgctgtggtctgtgatgttatccaaaccctgtgacacagggtcaacacagcaagggagacttggggtgtcctgaagactggcccaaaagaactagggtttgaggtttgtagttctttctgtatttcaatcacggtggcgcttcatctttcttctgagcgagtttctactgagaagtttcagactagcttgttaagaatgatttacaccataattctaggaaaaacaaatgtgagtgactgagatttgaaaggaaagagtaggggggagtgccagaccaaacaaatcctaagtaaatagggtggctttgcaagggtggtaatgggatttttgcttgtttccttacttaaaaaaaaaaatgacaatggattattagcaatcatttctcttacctgggtagagccaagcaaaggacaggaatggttctattggctccacacaagagcatgattttcaggaaggacaggtgtttcccgaattcacatgacaacatcttaatgagaatgaacagaactgaaaaggagaactaagatttctacttttatttttttccgaatgtggcagaaagtgttttgttagggtgagagataagcattttctataaaacaatgccccagtgacatgaggtaattacatggtggctggggcacaccgcatggtttacttagagaaattgcatgatacctacgtgatgactatagtaacactagttaccactaccacattatctcctgataactatataattagtttgtatcatcaaagcaccctaaacgtgtgcctattccagctactctggtagaaaaaaaaaaataaacttttttgcaaagggaaaaaaagctaatgaagaaagttgccaagaacagatattttgtaatctgtgctaaatctctgctggaaaacatgaacagtaacgaagctgagaagacagtaaaagaaattcggggcaaggtgccagacgcccagacggaaggagaatgtggaccaaaagattgcgacaatcgggtaattatggtttatgaatctcagctttaatctgtagttcagtgagtcctgattaaatatctgttaaacacaattaaagtttgtttttgtatttcaccgtcttgatcagaataattagagactgcgtgtttcgtgtcaaaagtagcaagaggaattttagtgaatgaacatcgtttttaaaagccatttgtagcaccagctgttggcattattttatattttagtgttatcagcataaagatggccctctggatgctgaacagtttccagcaggacaaggatggtgtgcagttatgatgggcacgtgctgataaagcaagcgtgttcagggtttgtgttctctacaaacagtgctggggagatggaaaccagagacgggttcaggtggcaggagagaggaggcgagcaaggcactaagcaatgggacttctggtggtgtagtcacctgcagcagcatctgcagagtctggatggcttgtgaagatgggttgtttatcttagctgaaggaaagactcaaggaggttatgttggaaaagtactgggagtctctcctgcccgtggctagagatgtgagccttactcctagaattgatggaggagggtacagaaagcacttaccatattaataattcttttctgggaaaactgtgagttctctaagcaggccatgcttaatctaggtaaaatggtaaaagaggactatacaagccaaagatgaaactaagattcctacgtcttatgccaaaaagaggggttagcaagttgcaagctgctaactatttaaatactttgatggcacattaagatgtctgtgtagtttaccattgtatgagcttaaagaaatgatattatccacttagtttcttgagatttgggtaccgagaatattttctttcctattatagattaatggcctccaaggaaatgtataccggaatcttaagaacccatgaatatgttgtctgatatgactgtgggactttgcagatatgattaaaggattgaagattatccaagattatctgagtaaacccaaaacggtcacaaaggtccttaaaataaaaagaggcacaaggttcacacccagaagaggcaggagtcaggagggatggtgctgctttgaagatgcggagaggagtcctaagccaaggaatataggcagctttagaacctggaagatcaaagattatagtcagcctttggaatgtggaaagacaaaggaagcaagtcttccttaggtcccccagaaaaaacgaggggttggtgacatgatcatgatttaggtgttattagttgtgtgggggaaagggtgtttattttgtgtgtggtgctggacatggaacacagcactttgtgcaagttagacaaatgctttaccaatgagctgcaaatacaacccaaaaaaaaatctttatttttaagaccttaagcttgtgatattttgttatagtggcaaggataaattaatatggtctcatgaacctgccttgcagacttgaactatcatttaaaactgtctagttaaaagtatgagaacaagtctctgaatttacccttctatggcccatttgaagtttcctttgtggcatcctttggagatggtgcctatgataataatcaagtgaacctgtactgtaaaatcacgggcaagtttaaccccatccctctaccacaacttagcagaagtcctatcctctcaggaggaactaagaataattagtttttcagtagtgttatttatagagatttctaccctcttctaattaacaatttctgttgatcatctaaagaaaacagttgcccccttcctcaaaagagtgagttacactctcaagcctatccatgggtttcaattaattatcaatcatttacaattgtgaaccacaaaaacactacagcattgactagacttgcaggatttgagaccaaaattatgtaagatttatttaacatgagaaattagactagccattaattttccatgcgatcctggcttttaattactaaaataagtggttttgatgggaatgtacccaggaagcacctctttcttctaaagtttgtaaaactatgtttgaagatccaagtgggcagatgctgccattgtcctgggctcatatcatttgtcattcatccattcactcagcaaacatttgttgagctctgactattctgctgctatagacagtaggaatttactagtgaacaggactctcaagacatccttccatctggaacattctagttagaggagatgggtaggtaatatgtaaagcctgaagaataaaatgaagaataataaaaatgtagcctaacagagatggcacataaaaagataacactcaactgattgttgaattatatcagatatagctatatgaagaactacagggaaatcactttggaaaaaattaaaagtaggaaataaaaagattcaaataagccaggcatatcagttatgaaaggtcactgaatgagaagtaagttacaactgtggtcagatgaagagtcaacatgcagagaatgcaggtgtcttgggagaaattttgaattttattccagttgtaatggattgtgattcatgtaggagaatctgagttcacacttaaagagaatattgcagttgttatatagagaccagagtagagaaccagtctcacctagtggtttggttttttttgttttttttctgtttctgtttatttcttttgttatgttatttttttttaattaaagctgaagatagatagcaagccatctcatggcagtgtagtgtgttgccttgtgaagaattgaagattcttaatttgagcaaccaaacaaggaaatcggatctatgaaggctagtgttccctgcctgtttcatgtgaaggcttgtgtgggggcctaaaaatgttcttcctgaaaggaaaaggaaatgtgtacacagtccagtgatgtttccaatggatctgtgctattttgggagatgtgagtaggtgggttagtaaaataactgaaaagtcaaaactgaaaacccaaaacctcaataggtgagggaatgcctgagactgtgggcccatccctttttactaaggttcactagacgtctgcctctatttcttaaaaactgaccaaaataacaagtcatttagattatttctctatcgttttaatacctagatttcaatgacctgttcatccatcaacctcaaagtagctcacagaaaagatgactatagcaaatgctgggaatgtgcaaagtaacttgaatgaactttacggaaggaagcagttcggttgtgttcagaagtgtttcccagtagagttaaaagattcttaagtgttgggttaggtattacttcaatatttggagtgttttgtgagtcactaatattgctctaaagtttagttcaatttctctttgtcatctcattaaactactataatcggtggcaaatcataataactatatccagggataaatgactagtgtaactagtgatttattgctagtttacaaacaacttacttccactaataaacaaaaagattacattaaacatttcttggtgatattcataaataatacatgttggcaaagtatgtaattctatatggcaatataggtagatgatcattctaaagaaaatggtttagagccttttctaaagggcattcctaaaagtgcatgttaccatgccagggttggtatgaagagatgagcaattcattgcagctgagagtagctaacttaaaatgatgtttatttcgttgtcagagctcccagaatgaccttgtagactctgcttccaaacagaatactaccctgcaatgccttattctgcagatcaaaatcattaggaactatatatgttttttaaaaagcatattgcaagtgcctaatacactcagcttaatcgaaatgaaggggtaacaactgattactgggcagataccaaagttgaaatctccagccttcccaggtccttctactatttgaagcactcacccctccttccattctcaaacttccccttctctgggcagcagaatgtaagccatctgagaaaagaacacaagaagtctttaaaaacaggacacttcatactagttcatctacaaactcctaataaaactgattgttaatcttccccggtttgtctgcatctttggggtaataaaagtgtctagatcataatgcattctttcagagagtattatcaggtgacttaatatctcttgcctaaacacacagtgtctctttgtgtccagccctgaactggattgccatttctgacactttacttcaaaggtcattttgttcagttcactgtctgacattttttattgtcttctagaacattcctaatgccccccacaccattgtactaagagcatctgattcattatctcattggtatatttcactaattattaggatctatctaattatgaggtttttattcccaggaaagtgtctagtctcattaatgatatacataatcagaatattatgaatactaaggcatagctaagttggatacaaccctgaaatgacaaaggcatagaccatttctaaatggaaaaggctttcctaactataataatttcatacatgtcattcatttctacattttgttgaaattaaatcaatcagtataaaacatttttatttccttcatatatgtatcagattgaaagacaattttcacagcagaaataacatctgttaagatgctacatcctgaagtgtactttctgtttttcctatgtatgctatcactatacccataaaagagaaaagcatcaaaaatacaatcaaaggagtagcagaatttccaaaaattaggcttagtcattgcatgtttaatgttatctagttattgacaaaaatgacattaaaaatcattagaaaataactgtagaaatacagacactagcaatatgtcacaattgctacaagttctggatgaatcttggaatggaactgtcacagtgatgggggtcctatgctaggatatttgacagcaagtgagattgacaaggaagacagggaggatttaaaagcaaagttcaaaactgattaagtaaagaaatacttgaaacttgtgatcttgtagacaccgaatgtgaacaaacctgctgatggagagaagctccggggggggggggggtagtggttgccattgcactacacatcctcatctctttatatgtgcttgcactgggtatggggtaccgttgctttccattgacaggatctagaaaacaaatggggaatgaaccacagccatacctacgctgtcttcagtgtaactttcaacaactctggtccagcttccagtttcaagctgcatgaatccttctcactgacaggtccaaatgtaatgttagcacgtttgggacaattaaagtcagcagggtctgtggctgcctaacttaggccttattgtgagctgggtaaacagccacttgtaatttagtcagtaagtgcgggtctttcatgatgggcatacccaaccccctgaaaaaccgatctgtttccatgcttggcagtggcattcacaagtcccctatggagcattatcccatgcccaagggtcattactcttccacagaagcactgacagttgtgatgaatggtggtacctgggaagagaagtgtttggatatttaaacagattacactttccttttagagcaagaggcattagatcacattttcgactgtctatgtatatggatgataaggactgcagccagagcagctcacataggagcatgcaagatccagatgttcaaggcataaaccctgtggggaaaacaggctggattttgtttcctgtcatggtattgtgtgctgcaaagcaactggtgataggcatgcataaatgctgagaggtggggatgacaacgggcatgagagtctgtccatcaccattagctacaacgggacctattacctgctggccagtaacaccctatccataccatctgcgaggaattagaaagtgtcgagaagaatcgggatcagtttgggttgcgctgtgagtgtcaggctcattttcttctctctcggccttttagtttgttatacttcagagcaaaacatacttcagtagcacaactgatcatcactaaggttttgttcaggaacttacaaatataatttcattttttaaaaaaattatattctatttacttatttgctgtgtgagtgtgtgtgtgtgtgtgtgtgtgtgtgtgtgtgtgtgtgtgtgtgtgtgtgtacatgcacacgtacacacatagaccatggcaagggtgaatgttagagaagaactcttgggagcctttcttcttcattcatcataagggtcccaaggacccagcgcagcccatcaggcttggcagccgtcagctttacccactgagccgtcctattgtttagcgtcctaaataatgggaaagtcagggccattgtcagttctgcgttttctgttcttcttctctctagttttgtttttttttttctaagtggggactagaaactagtgtttgatttcttaaattgatgctgactctggtgaggaaaattccctaagaatgtattttttaacataaactctgaggtaaagcttccattgaatccagagaggatatggtgacttgtttctcatccacacttgcagtgactgctttggcaagtgcaaactccccatccttcaggagggctctttgtaactgcttttacttgagatagttattggagtatttaaaagatacaagaggtctatggtactaaaggctatttaattagtctatgtaagcaaattggctgtctgtccagatgacacatcctatcatggggactccagggaaaggatcaaatctagatgtgtgtacaaaccataagagaaacatcagaaaggtctggcttgtattcatctacatctcctctcaccagcagaatctccttcttcattttcctccttcatcagacagtctaccaactcgggagtaactttcagtcttcagtcttactttgaagacggagggtcttgttgtgcccacggtgctgttgtgagcaaagagaccaattgtgagatgagaatattaaagatacgcccctctgaatccatccttgtgtgtgcagtgggatttcactctcagaaatgcagctcttcctcccaccaaattgcccttgtggtagcaacataggaaggagattatatattacttcatctccttacagagaaaaggacacgtgctaagggaaagctttgcttcttttaatgattccaggcatcccttgtctttaatatttcactaaagtggtccttggttggctttagaaagacactctagtgagatagggagaaatagaatcctgaaaatgatggcttcatctggaaaggctttctaaccaaaagggataaacaagctgtgaccctcatcctcagatcctcgcgaagctgacaaagacagacgcagtccttaagctatgactacctcagcagttccttgagaactgattcgtgcagtgctacagtttgccaggagataccaattcctgcttcacaagctcatctctgtttccaaagggaaagacacaaaccttttgggggacattttgaacaacttgcttcatgtgggaataagaaagatgaatcgtcacactgggtgaatggcaaagctattttgcagaacttcccagggggatgaagaggctacagtctccttcctctcctcatctatccagtcctggagtcacacattgaattaattctaccagaacaaaggtattgctgatagggtcacagaacctgagaagtgcagacctttcttctttcaaatatagtcatgttttatttctaaggaaaaaaaaatgttctcaaaacgacagtcacaacttcatggtttacaaatcctaagtcttcaccttggtcctgagtagacaaacagctagtatcatgtaagtgaacttgaccatgttgcctagctgcgtcttacctctaccgaatgccagaggttgtttggtttgtttttcttcttaactttatggcaagcatgaatcagattatttaatgtagacaccaatggttataacagtaatgtagttttgtgagtgatcaccaaattgataactgaggaataaactaaatatctcattagaaacctgtgtttcaggaaaaaaaaactcttaatgttatcatctcccaataattttggccaagtaagaaacaaatctggatttgcatagtcctttaatctgtctactatggtggttgggatgtaggattgtttgctgaatgactgaaggaagaaaacaatagaaaaatttgtgaaaaagtttccaaaaggtacaagtgcctgattctttcgcactgtttctcggtccttaatgttatctccctcaggaagaagcctcagagaactctgaacagagacaaagaatgagaaatagagtaaagctatgtgaagtaactggattagaaactctctgtttttagcaaaaataaaaaataaaaaaataaaaaggttatttatagatttaaaagtgttcctaaacaataaaatgtctgtgagctttattttgtgagaaccatatggacaagtttacagaaatgtctgggtcacaggcagggtacatctattcatagctgcacatctcctcgtatgctttctgacttaaggagctatgggtcttataagtgaggcccatagtattattgaatactacatggtaattggcaacttctacaaccatttgtaaaaatagaagctgaaaggttatgcttgaggttcatgaaagcatgtttatctggatatgccaccttaaattacacatatttgtttattatatatgtgtgtgtgcatatctagataccatgtttcagggatcaaattcaggtcattagccctgatgacaattgcccttactcacagagccatctcaccaaccctaaatgttgcagctttgatcaccaatcttttcttcaagtatttacttatatctttatcttcatttccatctgtcaaataaagacttccttagaggtgcatcctttatgaagcaacttccatgtactttaaaaaaaaaagaaacttgaagctaaatttctaacactgtagctttgtctgatccttcctatggctatgaattccttaagaagtttgatagtgtttcttagaacctagtaggtcctcaaacagttagcaaaatggatgctgttttgttatgaacatgaatgctgcttcagacattcctgtatcactgacagaatgatggtctaataaataaaaaggccttgctctattcaaaattagaagcatgatcagtgtttttttaaatcttgggactctatgaaccgtctttatttcaagtaaatatcttttactgcaaactctctttctctttaagaattattttaggcatatttttcaaaggatagctcataaattattaccttttaaagaaagaataaatttacaaacttaaagaaaataaagaagtcaggagtgagaacagaaaataagaactctgaactttttcctatgctatgaatgaagcatgtaaagacacgccatagaaagtgtcctaagagggctagaacagcacacttactgacctattgtcttcaagacttcctctataaacgataaggaaataccactgaagaatagcagtcttgtctggcaccattgctcttccagctgtatacaaagcagctggtgttttggacttctctttatccccagtaaatgtgggtcaatttggttaatgtatatattctatgcaagtcatcctggaaactatgaaaaattctgacaacttagcactgaaccaaaatatatgaggagatagtgtgatcaggtaagaaaaatagggtcaaacatgataagaaaggaaaatgagaacaacagaaggcagcattctagaaaggaagctgggaagtacagtcaaagggcaccatagtgcttgtgacagttcctcaagcaaggggagcatttggtataaaatggacttttgttgacagggttgccaaaaatataacgtcactaacaaacagacatacagacacagacattcacccacacacacacatatttagaggtcaacacttataactcattatgaaataaactctgccagcagctttctgggaaagattattcctataataatgatttcaaacatgggtgagggagagagaaaagtctcaaagggcattagtaagttttgtttgtgtcctgacctgggcaacattttgtgtgaaagtcaaatttctctttaaaaaggcaaatgacacagtaacagaaaatgaactatattatgtatgttggagacaggaggaagccattgtggtatactgatagtatcatcctgaaaacatttagcaacgggagaatatattgactgtcttagaagtagaagtataaatgcaggagtagtaggatctttacccctttctactctgccctggtctataaaatgacttccaaacccatcataaagagcatttccaaccataattaacacataggatgtcttggtaaagaaaaggtctcatttaaaatgataaggactactgagtgagactatataaaaatgaatacaaaaatacttcctagcagaatagatgtcataaaggacttaatttccttgagctaagaagagcatctaccattaataaaatagttatgaattgtcattctccatattttctcagtagccaaaggtcagaaataaatatagttatacgttagtatgtgaagtgttttgcttgtttatttctttttcctttaacctctgtaaggaaattattttcctacccactgttactttgcttcaaagtaggctttaggccatatacattatgaagactactacatccgtgtttgtcccccaactttgctgtttattaatgtatgcaaaatagcgcagccgtgtttttaaacttaatatatcttaatgtcctcctagatgaacttatttctaagattaaatgatctcctggctcgctcttctttggacagaagcaatgtacctacaatgagatgctatgagagattagttttgagttggtccatacacattttcatttcacctcaactgaacaccaagagggaccttgccattgagttgtgcatggtatttgtgcagaatgggtgtgtttcctctcttctctcctaaacacaaaagaatccaaaatatagcaatcaaataccatgtctctaaggtccgaatctgagtgaagcatagaatatgcgtgcgcacatgcaccccttccaggagacactgaggtctctgattaaggtagaactacatagacactaatgcactgtaacccaaaggcatcttatttattggcttcatccaaatgcataaatgctgcttaagaaaaaagatatgcaagtacactaagagaaattacttgattttcagtcatattgagaagcacatctgtcagtaatgaaagcaattctgtgtccgtggcctatgaattacaaacaacaaaaccaacataaaaaataaaaatgaaaaatgtagtaaggatttaaagtattttccattcagtgatggaacattttctttattgtaaaccttatacatggttttattgtataccaaagacggaaaagaatatatatctaataaagaattcatatatagtaaaatgcatatctaataaagaattggttaagtgaataaaatgcaagctatatattatgtagcaaaacccatcattcctatatgtgtgtgtctgtggtctacagagatgtattcacttttatacacacacacacacacacacacacacacacacacacactgttcaaagtgtgtgtgtatccatttcttccttctgtgattcttgctagtggtgctctttcctctggtctcagcactaggattactctaaaggtcactcttccttttgtctttcattttcattctgccaacaactacactctgacagctctctcccaacaatatctctttggttggtcttgtctctttctcttcagagactggaggtggcccttgaaaagagtagcccttatctgctttctagaaataggccgctctcccttcgtgggctgttctcacaaccctctgttttcagtgatttagaataattattcctgcccatggttcccactgttcttttcttggccttggtttcagtttcaggtgtccatcagcatctgtttcctctacaaaggaatgaatggggctttgttaaataaatctcggtgatctctggaagccaattgcgttggttcctcatacagctctgtctacatgtggttatcctttgctcttgtctgccatacttttgatgctttaggcaaggcaattggcttgcccttttccttgtccatgtttgttaagctattattccactctgtaacattctttgcctctgtaaactacttcattatttttcttatcctattccctgtgctgacatccttgatgactctttgtatccctctatattttgatccttgttaagcttagcctgtgtaggtatcatgttttcctcactcacagcaagaattgtaaacatcttctgagatcagatggtatctccttaaatatggtgacggattctccacagagaatttctttagtaaatgtttgtttacttgtctgggactcagtggccactgttaatcaccagtacatttggattgtctgcacttcctttttaaaatggcagctgtaggttacaaagggactcattgattctctaccctgttgagaacattggaggatcagctgaaacacccagaactcctgatggagttttgtctgtaagatcttaaacgtgcaaagaaagtaacatacattgcctgaacaagcaagaacttccacaaacaatgaacctgattcaccactcagtggcagaaggacggtggcttttatggttatttatggtttggttggttggttggttggttggttggtttggttggttggtttggttggtttgccaactcaatacaagctagaggaacctcagctaagaaagcacctacataagattggcctatttgggcattttcctaataattgatgtgagcaaacccatcctgttgtggacagtgccatccacagacaggtgtcctgaggcatgtaagaatacaggtgcaagtcataaggagcaagcaagtaagcagcattccactgtggtatctccttcagttcctgccttaaggtgtcagccttcagtctctgtcctgatctccctcagttgatggagtatgacctcagtgtaagttaaaataagcctcttcctccctaagttgcttctggtcatggtgtttttatcacagcaatggaaacagttgtacaatgttgttataacttacaaatgagtttatcttcaaatgagcacattggatgcacctcacataggctggagtctgaagatggaagtacacatcctaaactagtatgactaaacttactgccagagtctaacctgagaaatgtgtgcccatcaccttacattgtgcaaaatgttcgaatgtgctctagcctagtgtttgagagttatcaaaaatctggaagtggagaagagtcccaaaagatatccctatacttatagactgtggaaactcaggtccagcagggcagtgattatataagaaaatctccttccaatcttctttgatcccaccaaataaactctgatggaaacacacagattgctgcagggcagtctgtttcaaggctaaagaagagctagaattaaattttacatcttgtacatcttgttccaaatcatggactctccctgaacgtgtattaaagacttttttttcccatgaagtaaagaaccattttaggaagatggtttggatttaagttttgaagaggccattactcttaactagatgcttgttgaatgtactctaaagtaactgtgaagaccctcttcttccagcccggtgagtagaaacagactatgagaagtccttattattctgacatgggttattaatggcatggacactccaattgcactgttgctaatcactgcctttctgcaaggtaggtaacagtgcctgtttataactgagactagttgatgcttaaagcagtaagtggctcctccatactatatagccagtagttactttagtaaacactctggagtctggggaccaaagccaatgctgctttctaactaaacaatgcaatgcatgtgaaagcatttttacaaactataaaacagaatacaaatggtactttatatttgagacaggaagtcttgggaagggcaattttcaaatcaccttgaagaaataatggcttttaccctgcacaccataaaggctgtaacagctcttttagttatatgcaaaatctgaggattattcttctatgggatccagaagcagagagttttattcttatttgactaggctagccagaagcacaaacattcaaagtaggttttccccttcttcatatacacgaatgtatatcagcagtgccgtacgacagagaaagaggagatgtgagtagaattgttatatctcaatacatgcatcaaattcatgagccatttccttttagttgtctgacaggatttcttcatgactaccatatgaaatgtgtactcattcctctgaatttatattgtcagattaaaattagttcccagagatactgtcttccatattttggtattaagtaatacagaatgaatgaaggaatgaagaaagttgggatatttcacatagctgataggtacccttcatattagacagtcatgtttaaacagcactatagaaatgttattagccttaggtgatacacctttttttttaaatcactacttttattgacttgttttaattttataatttaaaaaaatgactctaattgaaaaatattggcatgtcatcaagagggtaacaatttgtgaaaaactacctaaatgatttaaatgaaatactgtttcaaaagttttgaatgacatgagatttaaatgatcactcttctaaatttaattaatctctataaccaaatccactatgtgtagctccaggtggtctttccctaaggagaagaggaggagaaagtattgttcattccatgagaacagagaccccttgttccctgttcacctaagagcaggaccagaaacatgtgcagtgctcagtgcacagttatcgtgtgcaatttctctatcacttgattttatgatgttccccacagtcagaagggaaatgtcaaatgagtgatatttacctatttctagaaatttgtgtttactctcaaattatcattttgtataaaatctttaaagaattcaaaatccttttatttaaactgttgtagaaagataaccttttttcaccctcataaaatagccattgctctcagttgtgttttataactgttcaaatccttaccttttgtttagtcttaaaagtatatcctaggttaatccatattagaataagtttagagaatagaagtctttggtttagaaagctgtaggtttgcttgtttgtttgtttgtttgtttgtttgtttgttattcatgctgtatacagcttatttcctaagagagctcatattagctaaaagttttacagttaccctagtttgaatccctgttgctatgattaaacactgacccaaagcatcttgtggagtaagagttaatatgagcttatagctcagcattgaaacccagcaggaactgactccatggatgcttgctgctgactggtttgtttcaccctgccttgctcagctgcccttcttatgtaaacctgcccaggactggcagtgcccacagtcccatatccaccagcagtcaagagaggtccactctcccatctatctgatggaggaattcctcacttgaggttccctctccccagatgactctagtttgtatcatgctaacaaaaacctggacgtcctaaatcaccatagtagttattccgaaactgaagtatcacaaaggcgggctccttgttccaaattacagaaatgggcgctgacttgcatctgtgagtgtaattttgagtcctccatgtgatgttcagcacattggtccagttgtccctctgttttcaaagaatccccatcctacacatcatcgaattgacttaagaagccattaagactctgaaaaaataatttttaggtcaaatgtgtgaggttttttgtttccagttttgttgttagttctaattcatacttgctatatgattccttctatggtttctttatcacttgtctgtattgtacaactcccagagacaattcctgactgtctttaaagtattaactaatcaatatccccacagaattagtacttgtatctttgctgttattcttagtggatatgcttcaacaaagacatacctactatgcacctcacaccagaggcaagaaaacaagtaggtagaacacatgtatcttttgtgtgcctgtctggtggtccagaaatgagatgactgtttacaggggcagctctttccttttcattctacaagctgaattagttgctttcctatgaaaaatccttcttcccacctccgtcctcactgcacacaccatcccagacagcccaacacactaattccccagtgcaatgaattcttcccaagtaaggataatcctgcctcagctgcttactcacgtggttacctcctgggctctgcaccacccatccatagcaggcttgccatttttattcgttcctgctagaatactcttagcagtttttattataactatagtggaggtggcattttagcttcatgcccttaagtttatgatttatagctttccctctaaatctcatgttagactagaatttctcatgcatattttctgtttagacacaaatgtttcataaaacttaggaaaaatattaagcagtgtacccagtgttcaaggatttattaaactcacctgttttcagaattagctgatgcacgttgacgtgtcgtgtattgaacatatgtggcactcagtaataaaccatagactaatatatgcattatagaagaaaaagtcctctttatagctttcaataaaatgaatattaagtagtctgggtggaggaggtttccagaaacctctagagacaaccaaatgatggttaaattgtggctgttccttttctagttctgatagttgatgtagtatcataaatcccagaagaactttatagaacctttgtaacatatattacctaattttctctctgtaacagttgtacaaagtgagttgtttggtgactttcctggcttatgtgtgctttgtttttgtgctggcatttgggaccgagtactgttactttaataaaaacaggcaaagtggttagttaagcagtttgctagcagtcaacttggcttacagtaagtagctttaatatgagttgtgtcctcatctgctcagccacaaagcctttgattttctataggatgtacctataaacataaatacatagtctgagttaatctctcaggtatcattttcacatgactattcttttgtactgtgttaaaggaacaagtccgtttatctcagtccacagaatgtttgcttggtttgctacatccatgtcctttccttttccagacaatgggttcttttcatcagaaggccaggttaaaggatgtgtagggaaagtgggaaaattcttgaactggaatatgttagtcagtcaactgggccataaattgtatttctccattattgttgattatactatactctaagcagacattcaccaggtcaatcctaatctgctatgctttacattttcctccaggagctgtaaatcacacatgtaaattacacatttattatagaaaagcatttgaggactggtgtcgaaatgtgagggtggtgccagaaaccttgattttagatatcatgacgtttgtacaattagaagctcaaccttaacattacattaacttagcttttttgcatttaattatagatattgggatgaaagttaatattttaagtctccattaatggttataatcatttttttgtatttttactgtaataatgaaaagggcatttaacctgggcaggaattaaatctaggattctaaagattagcattaaatctgataatgtattttcctactagtccccggaaggcaggttatacactgctatattgcaagagcttacaggtagcaagaatttgaaaatgtcctagggttcagtagtcctctttgaatcgccgtggtagcattgtgtttttagtttcacagtgggatggattttaagcaaatgaaggtacagagtcaaagataaaaggaattgacataaaaactaacggaattgcttaatttgtgaatttaaccctgtatcatgattcttcattagggatatttgctatactgattcagttccaagcacagggggcaaatgggacagaaagggcactaactattttgaagatgacactagaaatttggagggctcttaataattaggcacttaagctcacctagagaactgattagtgtgcagaagtggctctgtggctccaggaacacagacacattagaaaggaacaaaatgtccagcttccaccagctctaagccactgcagcctagacagggatgtggaaacactgtatgtgccgcttactgggccttccccaagagccactttggtcctcacacatatgatcactgtggtactgatgtcacctgaccatgagctcatgaccttgtctcatctgttgtcaacattccatatcacattcctgatttcccacacctctacttatggacaaaatgccttccgctcaatagtaataatatttatattatttaaaatcttgtttgcaagcaaaagaagatgaacattcataacataggagacatggcagacacgtcataggatctcattagggtctatgtaaacagagatggctggctcagtgtgctgatgtgctcctagtctcaatagggcattaggaactggatgggagggtatggtctaagaaagagatgcttaactatgtaagggtaagaaaatatcaatgatgtagcatggtgagaagaaccttagaggggagcttgttctggccttgcagctgacattaaagtgagtgcctgtgaacctgtttcagtgtctacacaaaggatgctgcttataccatagcacatgctgaaagtcaaataagtgttgtgttcatggaagtacttgggaaactccacagtgctttataaaattgaacattattacctctgtgtcaccaaaaaaaaaaaaaaagtggaatatccacctcattaactgggtgattcagaccaaacttcatttcactaaaatatgcaagacactatggaactaaaacgctgatgcttaaattgtatgaatactgcctcttaccaaaattttgttataagaattgatacgttctggctatggactagcagaataattgcaactttccaaaattacaatcttctgaagctaagcgagagaaacttaaaattggaaagagcctggacacttgtacattaagaaatgacagaatgaaaaaggaggattgtgcctttccaaatgtcaaaatttaaaatgctaataaaatccaataaacagggtatttaccatggctatggcaactagcaaaggttaacttggccaagggaaagaaagcgttaaaggtgcagagggacagcgtggatgaggacacaccgtgcaagatggggctctatctctggcatgtgctcaagtcatgaggcagcctctttgagactgcactgactgtaattattgtttagaggagatttacttaacacacatattatttcataactgtgccttttgtgcatagcagacgttacttttgactcaaagtgagaaaattgttcctaggtttaagcaagagtaccagtttgaaaaagatgacaggatgctcaaatacaagcaggacctgtctctacacatctaaaacagaaagcagaatattcaaacatgtgtatcttgcacttaatttaaactgcgtggttggttacctatctctctggcaattccgtataaagttttattactgtgaaatagaatagggtagggatttatgtcacacaaaaatgaatttccatggatgggaacacacatgaaataatttaagtaagcagtatgtcaaatgaaaatttaagatgttagagctggtggtatatagggaagaagcaacagaggaggtctgtgtaatagatgataaatatatcacagttagaaaaaaagaagggacctggttgctacagtgggttttttttctaatgttgaagaattgtggaaaacactgaagagtaaattttaagaaaccaaaacaaattattaaataggggcagcctcatttgtacatcaaagaaaaatatattacttaagtgtgagcccatagttccaaaatgttccattttgttccaaaatgagcaatacccacaaccctagaatttcatgaggtatgcacaataaagacatcttttaaaactccagttcacaaaggttactaaagggccatcagtgagcacagctccatttacctcataaaactccttccttgtcattgcttgctttggtttcagataatgagaattagggtgaagagcatgtgtttcaaatatgagagactggtctaagagtcttacacaccttacataccatcttacaactgatgttaaggttctgtgcaggctttaatggaatgctggcatcataaaatgatatgaaaaacttttttcattatattctgtacttgtggtctttttttaaaaacatagtctgtgcaagaaattcagaatagtagatatttgacatagggtttaagaatcctatttttaatttgtctcccacttccctaatccttaagcttagactaaacatctcaaaaacactataaaactagggttttatggctggttccagtaagagacacagcagagaaactaactatcctactatgtgtcctattgctgtgatagcatactgtaaacaaacatatcccgatccaaatccatcattgagagaaaccaaggggttagtacaagcacagaccatgaaggagtgctggttaatggcttgttatccactggtcacacagcttactttgctataaaccaagaccatcatcccaggagtggaccactcacagtcaactgggccctcccacatcaaacactaagcaagaaaatgttccacagactcacttacagcccagtctgatgggacacttatcagtttcttttttccagatgacgctaacttgtgtctagcacagtaatgtgcttccaagtactacttctaagttgatgtcatcctcagggaaaagaaaacatagggaaggaagagtgatgtgctccggaagggcagagattgtattgctttggaacttgcccttaaggtgactgtcagatgctaaggatgtcctggactactcaagatgccacaggtcctgcagagctcaagctctgcagcaaggtcttggatagagtagctgcctttgaccacatggtaagtcctgagaatggacagggtgacccaagcagaagcttaaagggaaaactcctgggaatagaactagaacatttcagtacttgggaagcagagaggatagaagagccaaagagaagacaagaaaggatccaagagagaaggcaaaaacaaaaaaatcagccactgttgataaggaaccgaaggttaactgcctcaggcacagcactggtaagcttgaatcaaactgaaactagaaatagccaccttcagcaaggagaacgcccgcactgacacagcatgcccaaagagcactgttctgcttgaatgtggagctggaatctcataggtggtagaagcctgttttactaaaatacttgccattttttaatgtttaattagtgggggtggggtgcacgcgtgcacagcaagggatccaaaagccttgccctaaaagcaccccttttttatgtacactcatagttcttacctttttcaattaatgttctttcacttgctattgtcctaatttttagaaataattctgtgtgtactttaaagataaattgttaggaaacagtatacaaaatatattaagttgctttagtgaccacagtgtattttcaaaccaaaaataagtgtaaaaataatattatcctctacttatatagagtaagacaaatagctatggtactctttaatcaaaactatttctattaccttctgtaatttctgaactagttatgttctattttgaaatcattgaaataactacagtttggagagaatgaataaaatgcatttattgcacacaaagctcttgcatataagtaaaaaaaaaaaacatgatagaaatcattgtgagacataaatggtctcttggaatagaaccagtgtgtctggtttaggagggctcttacttcaggtaatattagattctctaatacataaacctgcaaggcttagtggattaacataatagaactttctgttttgctcatgcaaaactaatcatggattcaggttggcagagactccatcatctcttggacatggcttttagagtaaccttgagtattacatccagacagaagactagagaaaacgaaaacaacagagaaaagtttttctgagccagactcagagcagtatgtatcattccaccaggattccattggccagaatgtggtcacgaggctctgttttcatggaagcctggggaaaggaggtttcctgcatgcccaagagaaaggtaaaaggtctttggaatagtcaacaattgcctaaggaccagaactggcctcttgggtaggatttaggatggcagacaattaagtacatacgggtgttacagaatgagaagggagtggcaacggaggagcccgttccagccccacccctttgtgtagatgtagggctgtagagtcatcgtaggtttcatataagctccataacagtagtgttcctctctcatctgaaaatgccatgcagtctcagagataaagggatctgccatgcgtggcagtttacttagctggatattgcatttattaaagcagagaagaactgtaggtattcaccttaaaacactctcatttcagaggagaggcacccaaggaggtcatggactctagatttgacacagtgagtcactgttaaaacgagagcaaacccagggctctaagctctactcagtgctttctgtgatcagagaagaaggttggcatttattttaccacgattttgcagaaataaccatagaatttcatcataaattagtttggtcttactttaattcctaccttcaaactaatggaaatcatcggtgctagtatgaaatttatgctaagggtataaataaatataaaacatacttattctaaggggggatgcattttatattctattctggagaccagtgtatgtgttcgtgtttctctctctccttcctctctctctctctctctctctctctctctctctctctctctctctctctctctctctctctctctctctctctctctctctctttcgtcttatgtcgacattttatgtccacaaacaaggatggataaaatcaacatattactgttattcttttacctaaattttcaaagagaagagaacaaaaggtgactgacaggcgagttgcatggctataattgagtctgtgttacttttattgttacaggattttaattggcatagatgcctaaatgtatatcaaaatgcatgtcacagcttttgtacaaaaataaatttgactttagaacacattttctttagtgagaataataaattatcttggagcttatgattctctacttttaaaaaatcataaggtcagtttttaattaaaagataagaaaagtactcagtgtccacgtagttaaaatcaggataatataaacaacaacaacaaaaaaagttcaaaggaaaagtctcaatccatcttcagaataattggcgcaaggatggcttcctatagagacctagaagaccagctttgaggactctcatgtcgcagtgtaaggaaattaaaaactgcacaatctactacccagaagttattctaaacttctttcattctaatcatgagttagaattgttttcgtctactaaacagatctcttggattcaagatctcttggatcattctcttttccaaaatagctaacaagaagactaaatggtcagcctccattatatgaaataaacatatataatagtaaattagagctattggtaactagtgtatgtattcttaaacaatgtgcaggtgtaggcaaccctgctacagcccatcagtctgttcttcatgaggcaagtttggcaactattcttttatatccttaggattatggtaagatactgagaagaccagtaaaatcaggtgaccgttcaaaaagccaactctgagaacacctgataatggctatctaaagatctactgtttctggttgtgtatctggtgacaacattctgtaatcctaaataccaaagggcatccatcacttccacccgcagaagcagtgtggaattgtcctatgccttggcttctgagaaaccaatgctggctttgtcagttgcatggcccacttaccctccagtgagatttttggacctgccatctagtggccactgcagaaacaggacaatcctaacattctggtcttcatttgaaaaggatttaaatggggctcatctgcagacacagagatgctctctgccctttgaacgccagttccctcctccttcattaagcacattgccattttcattcagcagcttcagtcggaccatttgttatatgcccaagaaaaacagatttttttttcatgcaaaacgatacacttcccacctggaataagaaaaaggcaaaaagaaagtcttccattattgcagaaagatctggagtgggaaagtggaagcggggaggaggggatgtgggggaccaggctgatactctgtcaagtagctctacttatgagactaattcttacaaactgtgcacccaacagagtaaacctcttatttgctgcttttctctgatcccctacatagctgtaatgttctgcttgtttttccctgtcctgtaagccacgtaggcatctgatattatacatagtgttggcaaaggaacaatttgcaaatgaattaagcaggtaattattagaatataggtccttggaagtatgtgttactgtaacaaaacccagtaagaggttacttttgtttcattgtttctattgtggttcctggttgttagttttctcatttccagggatttatgaatagaatgcagaaattcacagtgggctattactattattatttattatttgtcaaagaaacaagtgtatagagcaaaggccagtttgtgaactatcccaggcagtccacagggcctcaaattccacccttgagcaggtcctgtaaaacataagacagaatgaagacagatggacggatggtacttattcaatagcttaaatatagaactcgggtgtacaggtgcatcttcagatgttatttgaaagaaaagacagaatatcttggcattgtgtcatttattcataaatattataaatttatattatttgagaaactattctaaatatacaagaaggcttagaagaaggcaggaaagctgattgatttttctcgaatgagacaaagagcaaactgagcagtggtgactgatacggaggaaagagaagagccaggccagtgacaaagccaggaaaagaaactccaagaggatacataaagtttgacagacaggaaattgtatattaaaaataaatagaagctaaaaaccaagggggaagatgatcttggcaactatgttcttaatatgctaaaattgccgagagaatccaggagcaacagtggcatgaacaacaatttaatgaggaaattgctgtgccaggaattgcacggcaaacagaggacatggttctgggcctgaggaaggtattgatacagcaaaaggatgctcgggtttggataggggcaaagggaaagggcaataaaaaagtagaatgtatcagactgctgaagacagaattggagaaagctaacaagtaaagccacagggcggttggttttggttttgttatttaacatctattatccattggcattgtctgcagttcttattagttgtaccataaatgtaaagctatatctttgagcctaaagacaagaatattttcaaagttagaggaagattaacaacccagaagcagttgggaaagagaggcagcaggtagcaggggtttcaggacttgaaagtcagaattgatcagcaggcctcagaatggggatgggaaagctatccttgcagaactcgtgtatggggaagagacagaattaatttgatgaaacttttaaagatagaaattaatacgctggggcaggaggtgaccgccgagtaagatggatgccctgaatggaagagagcagtgtggtgttaaatgaggctgtcatgtgaacctgaggaaacacgggcttgtagtatgtcatgagccattcactcttgaagtacttattgagggtatattgtcttccatcccactaatggaacttatagtctagtgaagagaaaaaaacaaacaaaccaaatatgctaaaatgatcatttcacatagcgatgagtgccaccgagaacagctcagtgtgaccataaagagaggcatgcatggatggcggagtgggggacaaaaatgagggagcaaagaaatggattaaagaaaagaaaggatggggtgtgtttatagctatggactctggaaaattaaagtttgcagacactagaaagatgggaagtgatggagagttgaggaggccagaaaggctcagggttcccaccaggcctcctggttacatcatcactcactcagccactactcactaatccagtagcttccttgaactctcgtgatctgccctctaccccgctccagattctcattgctgcggctgtaattttgacattttaattactaataattacaactgcccataatctcaattacaggcatccactctccaattactacctcacatcttcacagcccaatctctctgttagccctattaacaatttctgaagcccataggaccccttaatttattaattttgtccagaggctctcatatcctcacttccttgtgtagttgaggttctgaaggccacacacctcacacacttgttctcttacagctctatgcttttcactgtagagatcagaaccagccacccaccctgatccaagcccacatgccaccttgactctgctagagccaaaagcaagcacatagaccactctcccttaaatttcatgatatctgcaagtggcctttgttgctgcccacagcgtcttttcctgcatctctacaagagtatttcacagctttccctctgtccagcttgcagtctccttccttgcccttcctgcctttccccttcactgagaagagaaaagcaggtaggctagaaggaacttcacacatacctgctctccagcaaacatcccctctcacatcagtgcccacagcctctgctttttgtccccacaactgtaggcaatctgtgcacccctgcctcagtgtcctcatccttgtgtgtcacatccacacctcctatactcatgaataatgtttctgagaaggtgtgctgaattcatgtgctttatctgttttcttctctaaataattctaatcatttctctaattctaaataattcttgtcaccatacaaacatactgtaacccctctcatcctaactactctcttggccctcaccctctctgatagcctactgtcccagtaaatactagtttacagttccaagggtgtctaagatctcataaactctctccagcttcctctgattagctttttcacaagtaaaaataatgaaactggctatgctggcgctccagtgccatacatatagctaacctcagtgaccaagtcacactcttcctctcttcccttctgtctcacccgcctcattcctttcccatgaaacacttgactttcaattcattcacacattcctgatttctcccatttcacaggccactcccttgcaatctccctcactgggtgtattcctgtatccccatgacgtaaacatcgaagggtcttagcaactaatctctgaactacttccttccaatctctccaatcactcccttaatattcaccctagcttgagtctctgatccacacttggttcctacttaacatttccactgcatgtctaatgaacatcttaaacttaacatactaggaatacatattttatctaacaaatatgcaggctaaccccctaggtgaatggtatctccatcctaagagttgctcaaattgaaaccatatctctctgtcagccttttatgtctctcacaaatccaaccaataagcaaacccagcagtataacctccaatccataccgctcatcccatcccgtctctctactgactcagaacgctttccttccttacacggattgtttctggagttccctcactacacttcctgcttctgcccttaaaatatccaggctattctccaaaggaagcccctccgcagtgtgctaggtaaacagtcagctcatgccagtcctctgctcccaactgtcagggctgggaggcttctctcaagtgaaagaaaaggccaggtgaggagaggatccataccacactctccactcagtcgcactggaaccttctctccctcttccccagccccgacccccccccctccccgctgtgtgtctgcaggtcctttgcacttgcttttcacactgctgcaaaggttttccctgaataaatcttgccaatcctcattattaggcttttactgaatcttcactctaaagcaaggccttacctaacctgcagaacgcacccagtctcttaccactcagaccatagctaccctgattcaagcaaccatccttctgttcctggaggcccaccatttgcttcttatcacttactcccttcaaacatgtgcttgattggcacatttgtctccatttgcaatggatcataggctccaccatctaaggctttctcttaggtgcttatttctttggggttttgtccattttgccctccaagacatcccctgtgcctcaccctatgccactgcattgggtgttcataaatatttttagataaattgtaggaaagggtaagcctttcttgtactgagttgaaaggaattttttttaatgcaaaacataatattgaacatagtggagcatgtgtccttcttaccagttggggcttcttctggatatatgcccaggagaggtattgctggatcctccggtagtactatgtccaattttctgaggaaccgccagactgatttccagagtggttgtacaagcctgcactcccaccaacaatggaggagtgttcctctttctccacatccacgccagcatctgctgtcacctgaatttttgatcttagccattctgactggtgtgaggtggaatctcagggttgttttgatttgcatttccctgatgattaaggatgttgaacattttttcaagtgcttctcagcccttcgatattcctcagttgagaattctttgtttagctgtgcaatacctctcctgggcatatatccagaagatgtcccaaccggtaagaaggacacatgctccactatgttcatagcagccttatttataatagccagaaactggaaagaacccagatgcccctcaacagaggaatggatacagaaaatgtggtacatctacacaatggagtactactcagctattaaaaagaatgaatttatgaaattcctagccaaatggatggacctggagagcatcatcctgagtgaggtaacacaatcacaaaggaactcacacaatatgtactcactgataagtggatactagcccaaaacctaggatacccacgatataagatacaatttcctaaacacatgaaactcaagaaaaatgaagactgaagtgtggacactatgcccctccttagaagtgggaacaaaacacccatggaaggagttacagaaacaaagtttggagctgagatgaaaggatggaccatgtagagactgccatatccagggatccaccccataatcagcatccaaacgctgacaccattgcatatactagcaagattttatcgaaaggacccagatgtagctgtctcttgtgagactatgccggggcctagcaaacacagaagtggatgctcacagtcagctaatggatggatcacagggctcccaatggaggagctagagaaagtacccaaggagctaaagggatcttcaaccctataggtggaacaacattatgaactaaccagtacccctgagctcttgactctagctgcatatgtatcaaaagatggcctagtcggccatcactggaaagagaggcccattggacacgcagactttgtgtgccccggtacaggggaacgccagggccaaagggggggagtgggtgggtagggggagtggtgcttacatgacactaatcaatcccttttttaaaaaatgcaggttttatattcctaaacagtggtagaggaatttaatgaattcaacatgtagtttacttgtttattttttgaatgttaatgaagtaaaaccaaattattgcttaagttattccaggcttacatcatccattaacactgtccatgccaatccagggcagggagttggtggaccccgtagcaataaggtccaagtcccctgagtcaatgaacaaggggcttggtagcctgggtaatatgtcaagatgctggcctggagatttccatgtgtgaagcaggtagaaagagtttgctagcagtgagaaaaagttnnnnnnnnnnnnnnnnnnnnaaatgtaaatgagctaaatacctaataaaaaatggaaaaaaaaaaaaaaaaaaaaaccccataatattgtggtctgggccccatgattctccatggcaaaattttgagattcttcaaaattaattttgaaaataagagttcttatgtaggtttatccaaaacatttgataggctactatttctgtttcatgcccaaaacagcaacatccaaagtgtttatttttctttttcattcagtaaatgtttgtcagggaatatggatactctagatgagtagtgccatgcatagagacttggaaacaagagagcataatacaatgggccactgaaataagtggcaggcaatgctagcctagctgatgtgctatagacatgtgcagtaacgctgagagatggcgaggccggaagttgccagaaaccagagacagggttagtggtgacacaccacactgtgcaccatcagcagctctggaaattatttataaaattagataagagtagaactcaaacatacaggagagcacggctggaaacttccctaataaggtatagacttaaaacccctcgctgtcaagtgactataaaaatagccgatgtgtttattggtgcccttggtgcctctgactaacagttgaaatagtttgaggttccagattttctgcctactaagaaaaacttcatttgtattgaaagcttttgttcttactttatacaaaggaaattgttaagaaatggactaatatgtgtatatattcttaaaaggtaagttttaaataaaattagacttataaaatttgtaagtttaaaaagtcaatagtggaaatcttgctttctctgcacagaagaatctttagctatttaaaaattgcattacgtttgcctgtctatgtgggagtggtaattatttgggggataaatgaaaggcaacagagaaggcatatcagttgggcaggtgtgtgaatagttaatcctgtttcctctcatggggaacaaaggagaaaaaagcttgaagaatatgaattagcttcaggagtatagaatttaggagatgtccagttgtattgcctactatatcagaaataaaaacattagtgttgaagagaagactaagagcccaagatgcagatatgaaagcatttaaaatggaaagaaatgaatgttcagtggggagtggacatactattttgaagtgttatgaaacattacaagagccagacatcaaaaaacttgtctgatacttttgttctaattaactctcacccattgtgacaccaatgtacaccctcactttagtttgtctttctatttaaaaacttcagaaacttgattcctgacctcttatattccaggcatgccttgatttcagtaatagttctgttcatcaaaataggaaggacaacaaaattgtctacatgaaaccgtcattgcttttaggaaactatgaaataagtctgtttatatatgaacaacaacgcccacatcacttatctgttctgttttccaatctctgttctgtgaagcctcatatccattggctataattgtttcaaaccgtggggatattaaaggagactcctgtcttaagcaatgggatgaaagacatctttgttctatttctttccaccctcagggaaggaaacagaatctaagaacttgggtaattcccaggccaggcacacaaacttaatccctacagtcaggagtcagaggcaattcacagaggatctatgtgaatgtaaggtcaacctggacttcatagaaagtaacaatctagttagggatatagagttggacccagtctcaaaaacaaacaaaacaaaagaaataaaaaccaaagttatcttatttctgacatcatttctatacctttggaatatgtgttctgcctccaatatttgacattttctagaggcagccaatgagagggaagctcatggtagtcttgctatagttgtagtctctgctgtttctgtttcctagactctgtactcatggggacttggttctgctttacttctcccttagcagcctcttttctctggtgtcttatctgtatatcttaaaaaaagagtcttccctcccagttacaatgctgtatgcactcttaatgtattccgtctctatggtaactgggttacaggccacaacatcatgattgctggagctgccctcatagtagggaaactggcacatgccctgccctgtgccccaagcttctccattggattgggaatcaaataccagcatttcaatgtgcagggcaagaaaggcagcagaggacgtgctacaaacccagggtctaagattcattcctgagatttgatagaataggtgatatgatttatcatgataaaagataacctggtgtgctgagccttacaagacgtccttaagctgcgagagaaggaagatcctttccttactagcatctaaacagtctactttcactgaaattaggaagtattctttagtaaactcagaaaacttagcaatattctgtaaggaattattcactgttattttgggtacagtctttcacgtaagttcctcagtaagtacatactgatctagtgggacaaacaaatggcaaggctgcttttctccaagcatgtcttagagtgggattagttctgctggttagagaaggaatgaaggaaggtaaccggcccctctggaatgcttctttcaggacacatcttccatccaaatgcagggcagagcagactccagtgtacaacacaacagaaacacaggatttgaagtaggcccttataactttgacccagttgatgtgtacagtacatttagcagtattccttgtgtcaggaacaactcttgaactttgacagctgaaaatgtgtatgtcccctaatgaggacaaaaatagccccagactcggaaccactgtcataaagcaagatgaaactccaataagacatgagatagagaacacgtgaagacccaaactattggtttaattagttattcatgagggtctggggagagagcttgaggtcaggtcctcagaattcatggaaaactgggcccagcagtgcatacctgtaatctagaactgggacactagagaaaggaggtggtgacagatgggttcttagagctcattggctggccaacctggcgcaattgatgcactttgggttcaatgagatgccccagctcaaaaactgaggtagagagcaactgaagaaaatggcagcatctatctctggctttctaattgacacgagtgcacatacccatgtaaatgcataaaccatacacacacacacacacacacacacacacacacacacacacacacacacacatatacacacatggaagggggagacagacagacagatggacagagaggctttttgagcctctgctgtctaccgggcattcttgtacttatcaggagtatagctgtgaacaagtactgatctcacggaactatgttctggaaaatgtgtgtttcatgtttccaaccagtgagatccctttctctccaagcagcctaacagcaaatgcttccagccatccgagagccaggaaagaaaagacaagctcagaattgaagagattcttttcagttatgaacctcaacatggctttgggtttaaaatgaaacttggcgagtgattaattcatatgttttagtttataatgtattctgatcattttggggtgttttcaaaacaagtggtgagattagggcttttttcccccttctatttttggtccctttactgtggagagtccttcacttttgattagatttggtgctcttaggatatttgaaaaacgctttcaagtatttgaaatgtgtatacatgggtgaagagatgaagaagggaaaacccaagacttcaggctcttagcttgaataaataatgcatccccatccccagcagaggattcaggcaccacttcttcaagaatctcttcccagaaagtcctgtgggcacatctctgaacccaggtatcttcctagcaccctccctaaattcttaccagggtcataagggaagcaaccatgatgtccctgttcatgtttttcccatagtgtaaatgttatgaggaccagtgtcagatctggcctgtgcacaatcctaccatccccagcacttgagaattgcttaattgtgtgttgtgtggcttaatgactaatagataaatatagctgtcgagatgtcctgtctaagcatctctaacctgtgcattcactagcacagaccccaccctcactctgaaaattcactaggctggtcattattctagaaaccatggagtaacatgattgttcttcagtactagtagaactgtgtttaactggaaacttgagaatagttgaagttcattgatcttaaggatattacagactttttttttagagatgcaagaatgtaagagaaataataaaaatgtgtgatttaggaatatgtttaagtattgctaatatcctgagcattcctcaagactaaaagggtttagataataaggtattgtttgtatgacacaaaataaagttttatggtttattaaggttttcttacttaatttctgttccctcttgtagaatttaagctcctataagatggagaccttgatctgtcaacacttttatcctctgggtctagaatagtgtgtggtttattgtggtcactcaggaaattttctttaatgagtaagtggtagacattctgtcaatagcatctggttgataattctgcacttttaataagttgctcgtgcagtaggatggtgaagccctgaagcccttatccattcactcagcattctagacagtgctgatacacaatagatagtaggtatttgatgagtggagaaacttagtattccagtgtatgtgtgtgtgtgtgtaattttctaagaaaattttgctagctcaaagtttcaggaaggctggttcctgagcgtttgctgacttttctggtcactttgatgtgcctcctggagaaccaagacccggtctctgccttatgtccacttggcattctccctttgtgtgtagttgctcaaactccgcctttgaaataaggacattggtcttattaaattaggccaatttcccctctctcttctagtgtaaccttacctcaattagtcacctctgtagtggacgtgttctcaaagtacagtctgaagtactaggcagggaagaggggtcctgctagaacttccatctaagaatttaagaaaagtaaaatttaatcatagcatctcaaaacagtatctatttttttcaatgctgtatggaaactggtttgctaatcacctataccgtgcactgttgtgtgaaatttgtgttcatacataggaggcatgggacatcagaagggcctgactgcatagcatatttctcaaatgccaccaaggtatgtaatttgacaagacaatgagttttataggaaaagctgctgaacgattccaaaggaatttgcatatgaaacaaaggagtttgttgctagctttattttaaagatgtcagatgaggggcaagggagttgtgctaattgtttttctcaatgttgtggcaaagatacctgacaagagcatcttaaggacaggcatgaggcttgagagtgcagcccaccctagccaggaactaaacagaagtggttgctggggctcagcctcctcgctccttcttgtctatcccaggacccagcctaggaggtggggccttctgcttacttggtgggtatttcctcctcattaaagttctctggaaacaccccagagaggtgcccagaggctgtctctttaggtgattctagatgctgtcaagttgacaggattaatcatcccagaagtctaaacatattgaatggtcaaaatacaaaatgcatgaactctagtaaatttgactttagaaagaaaggaatggtagtgaagaatgaacttttgaaaaagcaactcagacattttttaatccatcacagtactgattcccagtttccgctggaaaacatacctattgttgtgataaaataccatgacagacaaaataaggaagacagcgtctattttggcccatcaaagccatagccttcaatgtggttaggctgtagaaaggcccatccatatcatcctctatgaaacaggacagctttcgaaaccttggtattgccaactccagagaacttaatccacggagttgatcaaagactggctgttatctttctgtttatgactgtccattcacaagggcttgatcccagtgaacaccttagcaaagggtagggcagctacagagcacaggcaagtggaaggatgtgttatcattagcatagctctgtacagcatctgtaacaaatgtatgctctgtccagagaaggtactcaaaattcaagaacacaggctaccacatgtatcgtagtttgtacctccaactgttcagacgcaagcagactgtcatggaatccatgtacaaggtaagagcagaagagactggcaaggctagataaactcacaagtgccaagatagagaaaccaacgaggaaagctgtgcacaccaggctcctagtgcttacgtagctcaacccctacaataaaataagcctctttctgcttattaaaaatcattgatgatcttggccccaaaaaggttgaattaggagcacaactagacaaatcagattttaattgggctgagaagtaaataggaaacttgatgttggcactgaggcaggaagatcaggcccagagaaaacggtggctcatttattagtttattatgattattgtctttgttggagacttaatatgaaagccactatagtgtgttggcagcagtcggaaattgaaaggcaaaaggagtaagtgctacattataatcctggagtaggtcatcagtgatccctttgatgttacagatgagttcagtgtcagccatggagcgtggcctttgcttccatggcatgaaaagaggccaggctcactgctgacagcacagggtagcaggtccattctaaggaaccaaccaagtgatcagggaaagtagctaatcaaaacaaaacccaaataggaataaaaaaagaattgcaagtagttctgatggcatacctttctgttgtgatcaaacatcatgaccttagagttctagatgacttacagcccaccatggtagggaaagcacagcaacaggagggtgagactagcctataaatgaggaagctatctaatcacatttcatcaacacacaggaggcagagaaagcgagagaaaggccacactacaaagcctcaaacttccttccaatttagaagctctgcctcctaaattttctatgggctacccaaacagtgccgcaacctggaccaggctttcaaatacactagtctacagaggacgtttctcagtcagttcatggctccataattcagaaaggcaccaggctgtatgtttttctggtttgttctccacattagtcagcagcttaggtgataaagaagaagtacaagatcaggtctataagagctcaggaactaggaagccacagctagaaaccacagagacaaggactggaggctgaggaggcctttaaccctaatggtgggaaggaaaagaaaatgaatattaatagattaagagaaattgggaaaccaaaagctgtggtgagcacatagaagagagttccttttttttttttctcctaagccagagatgtcccagtacggaagtgtgtgcctgccgcacctatgttttgccatagacctcagggaagccacagacagtgggatgagcatcattctgggggcatagaacaaaatcagaaacagagatgtgctcagggtttcttccccactcaccactcttttatgagttctgttggtctgccttgcttgcctgtcacaaattctagggataatcagctttaagaaaggtctttcctggttcatggctttggaggtctttgatccataacccattagcctgtcagtttggacccatgtgggcacaggatatcatgggacaagtttgtgacttctggactagatcaggactgggtgcagaagaaagagaaaggtaggggttagagtcccaatatcttcatcaaagtcatgcctctagtgcccagacttccttctagcagaccctcctttctgaaggttatgccacttccaaagcaccacagactggagaccaagcctctagcatgagcttttgggagatattcgtgatctgaactgtagcatcagccatgctcactgccattttcaaagaatgttcatcttaaaggatgaaagagaagaagaaatagaaacgtgtcatgaaacaaaggggactatcttcacaaaaggcaaatgtagtactatccttagactctattctatgcttcttctagctcttcgcttcctcatatctataaacatcagatatggatggttcagccacctttctctacctaagctccaaaagagagctcccataagcttaatattgatttgagttttataaggtattttcaaacaggttcttactatgtagttcaggctcccctcaagctaaccaaatcactggctcagcctcagtattgggaggattatagcaggtaacaccacacccatctgatcatattaaattttcttgccagcatcctgcacaaagaaagttagtgcttggtaaagaatgcttttatatgctttgtaggtgacactgtacagttaatcctgtctaccctgtacattcagataaacctgccttgtatttttaaggacagctctgtccctatgggccctgtctccatatgtcatcctagcaaagtaaccaaccatgttattcactgtgagataccatgccccagttatccttctttcttgagtggatggaaatgagcatactgtgtagggttgagtagtttcctaaagcctaggagagaatttctaagccttttctcttggtgttatctatatataagtttaaaaaatatatctttggggggaatttgaataggtatttctaaagaggtcctcctttcactccaaatatgaattcttatagaattccaattttttcccttttttccctactcctgatcctcttatagcttctctagcaatcctaaaacccagctggtctagagattaatatgaccagacataccatgaattttttaaatctcaaaagtcccagtttctgcttcttcatcaatcaaatataggttatatatgtgtgtatgtgtgcagtatattatcctaagcctctcagttcttttctttttccttcacttcctcttaaattattcccattacttgttataaataggtaggagaaaaaaatgtgaggaacagagggacaaaaggtgtgaagtagtagaagacagtaacagcgagagtgctcagaagaaggggaccagtgagaagatggaaggtgttgtagctgtccacttccttagtctcttcagaccacttccgggtttgacgttgttagccttttcacctaatgccctcaaataactttttctcactgctagcaaactctttctacctgcttcacacatggaaatctccaggccagcatcttgacatattacccaggctaccaagccccttgttcattgactcaggggacttggaccttattgctacggggtccaccaactccctgccctggattggcatggacagtgttaatggatgatgtaagcctggaataacttaagcaataatttggttttacttcattaacattcaaaaaataaacaagtaaactacatgttgaattcattaaattcctctaccactgtttaggaatataaaacctgcattttttaaaaaagggattgattagtgtcatgtacgtatttgttcacttctgtttatgcaagataataagactattgccatgaaggaggaataatggtatttataattccatcagtactgtttatatgagatgaaaatgtctgaaaagaagtgagaggaacagtgatgccctttacacacattaagctcctctgttgctgtttggaagatatgtgaggaggaaaactagtgcactgcttgtggcaaagttagtgttcgtggcgttgtgctaaccatctgcctcagtggtgctagagattcagttcagaaagcactaaagatactgaaggaggagcttccccacaaagaaactgaggaatgtgtaatgcacggccctgaggcccatgtcatttaaggttagggtcctctggcgagtgcttagatgcttctgtctggaagaggcatgaactagaaggtatcatgttacgaaaacgaatcatttgaaatttgcctataatttcagatgtgcttcttagggactgagtcctattagttgttcaaataagaaagaaattcagactaagttgtgaagagccatgtcaaaaagttaaagggttttctgtagactttaggatatgttcatgtctatttgagaaagaaagagaattggaagcaggacaagttagctgagtagatactgcaagccataaagaatgaagtcatccatgggagttcatggttctcacagagcaggtaaaaagagcagataaagaggacagagagggctggtctgtgtcaggtggcatatccaccattaccttctaaagtagactagcgaatgaagagtagaggtatggcctgtccagaacagagtaggagagcctccatgacaggatggcaggactgagctctgagtgacagcttaggcagcaccaggctttgaaaaggaaaacgtctgctgagctaatgaacacagatataaagtcccatctgaaaaatacttctcaccttctcctttatctgagactaaatctcaaagtaagttcagaaactttagcagtcttagttttgagagttgagctttaataaaatcataaagtcactaatttttaaattgtattctttttaggttccattcatattcctcatcctgtcttctctcatatttcattgtcagttggaataattttgcattaaagtgataggtgatgaatgcagagacacagtgagaggtgtgttttattgagcctcatagaccctggaaacttgcaggagggtatttgtaatcataaacacagtacaaccatattggtgcaggcagacaagctcttaccagtgtttagagatacagacataagagcttgatgtaggttagctgataactctgacacttctaaccagtgtgaatagaagtgaatcatgccttgctcatctttgggctttgcttttgacaccaatttctcccatccaagcctctgcttggcagccttacctaaggatgctcagagatcatggccggccagtctgttgtagaactttgataagggcctttggttccaaaacaggatttaagatacttcaacaagaattttaaatattagattatgtttcttcttgtaccatgtccactataggaagaaatgtatgcacattcaatcgtgtatgcataaatcatttgcaacagagggagacattgaaagttcatgacagattggcatcctctctgcctagtggtaccaaaattaaccagtttggacaatgggagaagtatgatagtttgcctcagataggacattcagaaaaagtcattttcttctctatttacatctaatttttttttataactctgaagccctgtacttagtagaattgtaggagttagcataaaattcttcttgccagttacagagatgagagattttcaaatctgatggctcctctgaatagtttcctccacaacctagaacccacttgcttccctgtgtctgtccacggtgcatttctataatttatccacagagattttttaacagaaccttacacttactgtctaaattaatgatgttccttccttttcccatgacaaaaaccactctaccttccctatacgttatgttagaggtggtttttctaaggcatgtggacacattctgtaaaagctttttcctttctgtcatgttgacaggctgattccattaagtctcccaccatcatcatgttcagctttttctccttttctgaaaagttagaaaacagttatcataagaattttagaggcattcactttggcaagaataaatctggaaaaacaggagtctgttccttgaaatggaaaaaggagatgagtcctgacattctctgcgcagcgctcttcctgacactgttgttcagaaatagggaaggaggcgggcctcttcttccctttaaactgtccactgaggcgcagtaccttcccggtgttcttataggggtcaggcatctctacctcagcgtttactgtgtgttatcgggcacttagagtggacactgcgagaaactgagtgaatgacgagcaaatttgtctctcagccatttcctccctcttggataaatgctgttttgagaaggtcttagggccccttggctgtttggatgtgttagggtagaactttcccttctccaccagtgccaagctttcctacagacatggaaaccccatccgatctcactgctgctggtcttttaatgctcagtatgggagtggtgggtgggtcatctctcagggagaaatcatgcctggacagactcacaagatggaaggaaagctagggttcttcagtctggggtacaaactgatcagagatgagaaaggggcccttttttgtattgagtcatttgggcttcattggtctgagaaaaatggacttcccttgaaaggtctggtatagaacattatcaaatgttgaaaattaattcagagtttgcgacagccttggcaaactggtacatttggaaatttaccactgccaacacttaagactcagtttcttataatttaccttatttttttaatcttagaagcaacaatttccttctgcaactttgggtgaaacctttatgttttcataattgtatttcagacactgccatgggttcccagccagcagatatcagctcagcctttggtttggtctgaggagtcccactcactaggttgcctatggtctaatcctctcaggaagtataaggctgaggagcaaagggaaagcattcatagctcccacatccttagtagggactgactgcaagaatccagacttacaaggtgatgtctaaggccaggtttttctggggtaaaagagattatagtctttctggggttatgctagcaaacagcgaggggtgaagagtgagagagatgatagggaattttcaacaaaaaccattggtgctttcttctttctaaataaattgctcttatgtttataaagtatcagaacagaaaatcccaaaatgcttataattttgaggggaaaacatatatgtgtgtctcatctagatttttttttacttgaaattaagctaaaagtataattgcctttttgaagtgaaccagatgacaaattgagattttgaagaggagaaagcccagtcctccccacccccatacacacagagagcaggaggatgggggaggacttatacctctttcattacctatgaaaaaaactaaatttggatcttgtagaaacagttaagaaaatgcaaattcccctaagaggaagtattaaaacaattactgagtacaaacggtgatgcagaggcgaggattgactgggaatgtccacagagaaacaatccccgtacatttggtcatttttctacaactgcttggtgatcagaatgtggatgtggaaatcagaggggaaggagggagggaggcaggaaggagtgagctttatgaactagcaacctgcattaagcctgttgtgccacagcttttcaaaatccaggctgcttgtaggcttgacccttggctgtttagttcactcctggcgtttgaaacagccagagcagnnnnnnnnnnnnnnnnnnnngaaacagccagagcagtggctgcatgcgtcaaccattatgccagttaagctatccaagttagcttaatgctgacttgattttctgtggtgatactgaaaaaaatatctcttttgaaaggtcttcgacctctctcctcccagctcctgatcacagtaataaacaacctcaagaagtcattagtagggactagctcaattgcctgtgacaagtcagctatgaagaaattggcatcgtttgtctctttgattcttgttcttatgaaaataatggattgggaaaaaactacagttctttctctctcggtctctttttgcaaccatatctttctttatacgttacatcaaaactgactttgtgggctggtgttctggtttgagtgttcctaacaaaatgtagacaacaactccaaaattttaatagtcaaaggctgcctgttgtttgaggcatgttagtgttttgcttataagaattgggcagtgtttcactaagctactactgagtcgtagatagaataggctcatcttctatttaagagatgtggcaagctacttttgaagtgaaattggctccgacaaggtcatcagaagcattcatttgaacctgtgcagtgagagatggacacttctgctgagccccagagcttcgaggtagatagaaaagaaagccattgattgctgccacccatcagagctcccaggagtctgtcagtgcatgggaagcatatggggcccctttcgtcatttacaagagctgttcactgatattgctggttagatttggtagtaataatgctgagtttttatgttatattctagacttttcttccacctttttttaaattgaaaatttagttaatatgcacattcaatttcagatttatgaaatattcagctaaacttcttagatgcaaaaatgaattgttagaatattgctggtctgtagctaaccattatgctaaagctgtagtagattatagtacattttctctctgttttgtgtcagggcatttggtaaattgaaccaagacctaggcaccacatatactatttttattttagtaacttactctctggttgcctaattcccctttaagtttaggatgtattttattaaactgtattagtgttttgtgttacttgtagggtcagcattttataagattttgttgtcatcttaagctaagtagagttgagaggttattcaattcgcccccggctggaggcagggttgcatttctgcaatccaaaatagatgaggatctttcctatttttaaagagctgtgaaggaagaaatttcataactgctcttagaaatctatttgattatttacgactagcatattttggatgttcttcttgaagtcttaaattcttcactcacctatttgatatcattttgcccaaagacagaaatgtcaatccttctcctctttgtaaccactcttacagtctgaaaactgtaaagatgcaactaggctctttcttccctaaactaaattatccccattctttaacagttacttttatttctatagctccttctgtggcaagcaggactatttttaaaagttctgtcatatatgatgcttctgacacaggcgctgcatattttaattccactgtgctagtgtggaaatagccacaacttttcattatatcctgatggacagagcatttgtgctcatttaaccttgaggtttaaacttattcccaaaaaagtaactgactcatagcattggcgagacccggaataaagaacaccagcactcctaatcggaaaactcatcttgcccccactcctgaaatgcactaaaattaactttcccttgacctctctttctagtgctatttatttactgatttaacgacttttttctatcatctttgtctcctaaaatagacagatgacatttattcaacaaacattggagtgtcatgctgtgtttaacacacttagcaaggtttgggagattcaagtgtgaactgtcagcaaaggctgggaggcatggctgtcctgggcatgcgcagggaaaaacataatagtctgtcaccatatataaagaaacagtggagaagaaaacagagatgggcctgggccaaattgtgagaggtcttggatgcgcttaagcaaatagctagtcgtgacaaggatgaaagtaacactttgcaatctgtattgcagaacactgctcctaagtctttaaaacacagacctagcttatgttgtccccacagtttaagcagtcagtgggcatacctgattaatttctgtcttttgatatgtggctcctaattttccctttgtattttaaccatttgaggaaacctttggtgaggaacaccctctgtgcacacaaatcaggatacttctctgtgcttctgcagtgcacatattaattctatgatccactgaaccaagcactgttattctctgcatttctatattgaaaagttttggagtatttgtgtgatagcagcaatctctgtagcaaatgacattaatggtagactagaacaacattgtgtgcctttaattgataggccacataataacagtgtcagaccttttaaggacacacacacatacatacacacacacacacacacacacacacacacacacacacacaaatcaatttgctatagggaagaaggtctgacactcaatccatttagacgctgtaaagctactacttcagaaattagaaatatacagggaaaaatggaattacatcattgaatgttcctaaaatctgctttagagagggcggaagagaaaggaactggtgtggatgtggtcatgtttccttctatatatgtatgagattcatgcagaaaaaaattataattaaaatagaacccatcttaactataaatgcagcccctgctactgctcccagagctgctgctcccacttcatttgttctctgatattttgttctctgatcctgtgaacatcatgaagagtcaggaaatgtggacggggtggggcaggtgtttaattgtatcttggcaaaggctcgtacgtaggctgtgctgtgcctaattactgaagtttagtttctgcatcttctctctccattggtgattaccttatcccatcatctgaggtttaaagaaactgttgttcacagttatgtcataacgttcatgattcttttatttcttgagatggacacaaataatatggtcccataaggctgacttcaacacaggagtgacgacatggcctttatgtttttctcccaccgaccaaaagaaatgaaaacacatgagcaaagggcccggcgtggtgttgcaaagaatacctctgcacccatgccctgtctttgactcacaaacctttcccagtgtttagattttaaaaaaaaagtagagaattaaaaactcacaaatgcagagtgcatgtaatgccattaagtctagtataaaacttcttgaatctgtcacataaaaaaaaaaaaagtcttgcatccaacgcaaagatggaatatcaattgccaggagtctgtggagctggcgctcattccgagaggcacgtgtgtctagaattccaggggctcctcagcctttggaaatcctggaagtcaaagtaaaaatcagccgagtgtttgggaagactccgacatacaattactaaatactatatttctgcaacactaaaagatatttaaacatgtacattgaaacattacacaaacatttagaggttgtccctacccctatgaagcagagatacaaacccacctaaattctagaaagacttaagattaaagccctgcctaagaggccactccttcatgactgccataccttttaccgtcctaagcaagcaagaggagcttggaacggagatcgtctgaattccccagctctgtcatcagcgctgtgacacactctcattttctgattcatctgtgatgagtaagcactcccttttctattcagtcctcagagtaaccaaacttgcgagttatgatgacttattttatttttccttactgaattatttttccttactgaattattattgttccctcttagcaaagtttgtggcactctttgtcaccggtgttaatccatatgcagaaaagctggcttggccagtcaggtggcctgaaccttgagttagttcagagcaaagacaaacaggcaagcttctgtttttaacccagccagatacctcagctggcaggcagctcagtttcctcaccataaaatgggtataataatagctttcccttaccgctgtgaaatatttagaatgcaaatcaagccaaacctatctccttccaaagtgaagcctaaaccagcctgcataatcctgaatgagcccagatttcaaggggaaacttcaagtgggaaacacctaaaggtagtataatttagtggttaaagtatgtggactttggaatggtagggactcactcagaggctagtggctgtgtgatttggggtaagtttcctaattcctgaaatctcctctttcttctagtaagttcagggtaacagtatttttcccctgtagtgtgggctcagggattcactctgacagtgcctctcacacttgccctctggcagtcctcaagttagaatggtccggcatgcctcctgggacactgcctgtgtgccccagacaggacatttcacatttcagggaggtctcaggtctgacccctgaaaatacacatggattcttgttttcttttcatttttcagtatattcttgtttgtgttactgaactagaagaaatgcaaggccaagaagagaatctgtttagtttcttctaaaacatccaagaaaaagttaatgggggaatgaatgtattcatctataaagaatagtttaagttatttacacacaaagaaaaccagcccttcaggaaaactgccatgtcttagtgtcggagcctctgtgtaccccatgtagcttgcttcgtacacatccctggggtgacatatgtgcaaacgagacacacctttccttaccagatgcctgaaaccacagcaggtcctcagagctaggaactctttctgttgctaccatttctccactccatactcctctacccattgttctaactttaaaaggaattataaggggtggataatgatctaagtacattatatacatcataggcaaattataatagagcgcgttattttatattattaacatatgctaataataatgaatgaggaaagtattataaaggtctagggtactttaaaagagcttgtatctctagtcacgcatctttaccaacttagttttttacatttccatttttaacattttctttactcctggcttcagcttatgtttggcttaaactttctgaagacaaatcaaagagacttttctctactcatctcctcagcccccaagtcacgcgtaatcaggccaggggagtcatacatgcgggctgctccggaaccagccgctccttgaaacttgttttgagcttggggaaaaggattctcctaagaacctgcatcatctctaaatgctgaaaaccactgccccagaacattatgtacattcaaattagtgaattagccttttcagctacaattaaactacaattgggtccttagagattgacacttttgctatcacaaaactaagactaggcctggctacccactactcctcccacacctcacttggtgtgcgtgcccactgctgggttttaatgtcctgaattatttggcctttacagttttatatcctttgctacatatttgtgtgttgaacctggaatattcaatgcaaatgttttaaatcctgtgtaaaactactctacttaattctttgcatttcatataaaaaaacaacttacagacatataaggtgactatcactcgattggaaagggcacatgtcaatacataacattttcaagtgagcaaaagtaaatctatgtagattaatacatcttgtaaaatcacatagcagactgcagttcaatcaagaaggagggaccttttgacagttatggacacttatgaattttacatgaagtgtaaaattacatttttaacattagtattaaatttgggatttttttgtttttcattaatatattagaacaaatttatattccccccaaatttacaatttaacttcattttgtcttaaagtgtaacatacactgaaaattttctatcttagatttttttttgttttttgtttgtttgtttgtttgtttgtttgtttttgtttttggagacaggatttctctgtatagccctgggtgtcctggaactcactttgtagaccaggctggcctcaaactcagaaatctgcctgcctctgcctcccaagtgctgggctcaaaggcatgtgccacgcctggctctatcttagattcttatcattggtaacctgtgtatcattttatatcaggaaagatagtttattagtcctcacatgtgttggtcaacctgataactttctgattttgtaaataagtgctctttggagtccacatagaaaagttacctgcttaggcataataacataaacaactgatatagttctcaaagatcataatctatttttgaatcttatttggtttataacatgcaacagataggtggtaattgagcatattttacagaaaagttactagtcatatttaccctttgcctttcttgagagataaatcatgcttaaaaatgagggagggagaaatgggggaggggagaatattgaacaaagaggagggaggggaagataaatggcaaaaatatatttagtgtggtgatttggtgtcttggcttatagagaagacatgagtagataaaactacagtctttgaagactagcccctttttatttgtatttccaatttgtaaatactttcaataattcatatacagtctaagtctctttttctccaattttcattagctctatcaattttgtgaaaaaaaatcagttaaagtacaagagctcccaggtgtctcttagactggtgtgtacagtgatccaggccacaggttttcttttgaactcttcctgtcccacggggaccatcatcattcacagctgcgtgtaccaggcagatttcacactgaccacacagggggaaacatttctttagagccgcatctatcatggtgcacttgttcagaaaaccttctagagaatgaggcttcctggatttaattttctgctttggcctttttcaatgtgagctggtccttcaaggtaatatcctttgataaattcatcttgatacttttggaggctttatgtgacctggttaagatcaccttgttagggggccacagtttcacattgtatatctgatgtgatttgggggcctggtgaaaggaattctgttatcttaacttcttctagaagagtatccatcaaaactgtggtggcattccagtagtaactgattatttgttttgttggttgaggattgtaagaggtaattattagacttttaaacatagaataggaagctatcatgatgaactttcccaaacctgaaagtgtcatcgttagagccatgtttgggtgcagaagtttttattccaatcaccctgtcacaatatcaccatcaaaaacagagctctcttcagtacagaaatgttctgtgtgctcttcattaaggtcatcgccagctacgcatggccattgcacacgtggaatgtagctagtgtaactgaagctctgaatacggagcttttcattaaagttaaggaatgtaaggagacacgcatagctagtaactactttagtgcacaggactgcccgtccctctagacaggctgtctaatagaggccaagtgacatcaggaaaggtctgggtcctttttgtacaggaatacactggcctccatcatagcaaggctacagctcttgaaacttgctgaagttggacattaatgattttgtggctacaggtgacaaagtgtgggagcagtgagtcccatcaggaatctcaaggttttgtggtccacccctgcattagattttgtgtctaattctttgtcttttctttcattttcagtcccttgaccaccagtctgttgcctgttgctgctcttcatgtgagtaaaagtggcttctttgcctttaaaaaaaaaaagaagtagtagatttggggaaaaaaaactctgggttttggtgtcctatttcctggttgactttactgtggtgtctagcatccatgtttagcgccttttcctgcttggagccaagtcgggtagtatactgctgagctgccctgtgtgagggagccagcagcccagccattgtcctctgaaaagactgccctttcccttgctgcagctgctatttgcaaaagtcgctgctcttctgaactgaagcttacagtccacagccagatctcagcaacagttgggctttgctcctctgtcaatcaatgagcaattatttattcttccgttattcactcgtccctaggtccaaccatttttaattttaacttctagatcagagctttcatttattgacaaaatttataatatccttttaccaagaagtacaagcctgaaaagtaaataggctaaaaatttgtgcaaaattataaagtctaggaagaaaaataaaagaaatccaggattcacatgtgcctgcaagtttatagaatgcgccatttcttttcagagaagacaggaagttttttaggggaataaaaagaagaaatggagaaacaaaacttgatttaaaatgaaaaagagaacatttattatttaaagaccaaacctgcctgcactgagcagatttggataaatattactttggactgcttttaggagattctggggcaatgaaatcaaatgatcaagtcactaccaagaggcaccacctaggaaatcctacagagacaggcagtcatctcagataatagctaagtaaccgtgaccgtgggtatcctgctcattgcatctccctttgtccctcgatcacattgccacctccccgtctgtggtggttcctgtgctgcagtggtctgcaccaaatgacgaggtctctgatttcacatctatgtggctttcactatcagtcctagaagcctgcagcagacatatttaatacaggagaatgcagggaaagatgctaaggctaaagtcaaatgtgacattttatctgacataggaaggaggctggttagactcctcaaggaatggtgctgtgttatacaacagggccaggtcctacctggccctaagccatctcattccctgttcattctcagtggtgatacagccggtcagctaatgctttggatgatgttggtgtgcatgctcatcgttaccactgtgtcttcctacccttcccttccccttcgttacctagcactgcatatttctagtcctctgactggcaaatcattttgtaacagctcttttgtgtaaaaacagttcgcataatagctcagtgttagacaaggcattaatcctcacatcaccaagatgagtcagcacgatgaactcctgcccgcctagctcagctattatgacgtcagtgctttggggcaagcatgagacacaaaccgtataggagacctgtgtcacctagtagaaatcaagtcgggaggcctctaattgaaagtccgtgtgggcctcataggaaattgtgaagctaattctgtgctacatcagcagagcagtttctggactttttttttttttttagcagagtaaggctgggaaaagaaaaccgtgtcacaagctgatagtccattcatgtactcatgaccttgtcctaccccaagccaggcttcatgcttgcttgcttgacttgttagaaatcctcaagttgcctttatgccagcaggatgacggagccagtaacagtcccgtgtcctcaagtgctcccatggacagcagctgatggctccagggtgctgctctagaggcccctcagcagcaaaggaacagttccttgggaacaaaccagagcattatccccagggcctctccttcccaagcgcctcctcaatgacctcctcgggacaggtgcaagactcagcctgtttgaccttctgtccttggcactgcatgcaatgtccgcatctggaattgacccagatttaaataggagttgaatagctgccacgatttcctgcaagagttttctgtcccattattcttcggcagaaacagaaaggaaaactccacaatctaccacgctgcctcaaagcagatgacacagactagccctgtttggggagcccagttcttgtcagcaaggcttctctgaaattcagacccagatatgttctcttgccagtcctttacaatattaaaagttaatcatcagaaggtggtaatgtattccattactgacattctgtattaaaaagatgctacatcacagcctccatcctgccctgccccatctaactctcacccaagccagtcaccaacccctgtgataacccagaaaatgcctcagtgctgggattttccactttcattagagtgctagtagtctcttaccatgcttctaagagctatggctactgcttggcttggttttgattaattatgcacagttctttatttagttttcagtcaacaaacgtttatagaaagcctgtaacagtgcttagttctgggaactccaagataaatgagaaatgccacctttcattaagaatggcacagtctggggttgagagaacagctcaagctggaacacttgtagctcagtgaagtggagcgggagtgcaggcctgggcttgccccacagcaatgcagaaaaaaaaaagaaagaagccctcagtgttctagggacgatgaccatgtgcaaaggctgttttgtgaccagcactggaattcaggtatctccaaatgcttacccatagagaaggttcaagctggctcagaaagtgaaaatagtgactaggggtttaccaagtgggcacaggaggagagagagaaaggggtttgttgttagagaaaacaagagcatttaaaagtgagaaggcaccaagtaaccgccaggtctagctactgagttctcgagtgtgctagcatgtgatagacaggagtcaagtcaaaggggcctctgatgccaagcaaaggagtttagacttgatcgtacacccctgaagatagtttaaagaaacctaaggcaattgcttaagacttgaactgtgcagtgagtgaactgtgcagtgagtggagatgagatgtcatttcagagtgctgactcaggcattaacatttgtgtaactcaagcatatctttgccttgccctttaggagaaaggctgatgttaccgtggttgccaaacttaaagccaaacccatccttatgggagttccactgaaggcctcagtctagcatcacactgagctgctgcctgctagccttgagatgtacagggttcttctgcccacagggggcatgggatagctaggagagagaatatgagagacaaaagcacttttaaataatggctctctaaagtcaatcaattcccgatttcctgtcatttttccattgctgcctttttctaagcaaaatttccaagccattgaactgaattgaaacttatgcacagccgggtgttgaaacaattcagtatattcattccttctctctgaattagagttcaccataagtgtgcttttctctcgttcactctgggctgccaggacaattttaaaggagaatttcagcagcttgtgtctcacgtaccatgttctctttgcaaactggagtatctgcgtgggtgtgtttaagttgtctctatactgctttctagaaaggtttgagaagatgcacacgatgaagagtagggacctattacaaacccagatcccccagtgacctgagtgcagaacgtaggctggtgatcagatggtcaattatgtgtttgtcaaaacacagtgggctgcattccagactgccagctttggaggcccagcttctgccaaccaaatgtcatctgggaacatgcaacactgggcactgtgaaggagtttgaaatagaccatgccacagccaacctactgccagtcttatagcaccaatatggcatgcacagccgggccccatgtttcagagctcaggaattcactgtactccattcaaggggtcagatgggttcatgttttcaaagcctatgttctctgatttgaacactgtgacttgttcctcagcaatttccaagggatttttccagtcacatctctgtggaaacctctcgctctgtgatgcttatgagagccttgtgaaatgtcccagaggagagagggtaaaaacaaacctgctctcacaatgacggactctttaagggattccagctctaaggaaattacattaaaggtgcatagcttttaaaatatcaggaaccaccttggcaacttataaaaagcagaagggctttgcctattttataaagtgatttgcatatacctgcataaataatgtccccacctgtacttttatgcatttaggttgaataaattaaattcagtgatctttaaagtattctgtgtctttcattgctcagataccattttcaagacccttcctcttcaccccacccccagccctgagattgtagtggctatttgttttttaatcttttggctaattctgagaactaaagtacactgcacatcagtctacaacaaccagaaacattatcttccgctgcttgaatttctcttttcctttcgatcattgggccaagtattacttttttttttccacaagagtaaatggaagagtataccattaatgtgaaagcatagcccagggaaggattcatacacagtccagagatattagccttatagtattttcatattaaccttttctttcctttctttccttctcctgttccttggctcccatgctgtttctctgtctctgaacacggtcttagtatgtagtactaggctgccataattggattcatctttgcttgccttggtcattgataagttcattcagaaaccgcctgtctaccaactctatcagttataacctgggcctttatgccaaagcctggtcaacagaccagccataaccgcattcatcctacaagatattaagcatgtgccgttgtttgagactaatcatgtttagtggagttaaaatacatagtttttgtgcttgcttgtactaaggaaacttaaggttgagttgagaaaagaaattaaactgttgagtgatttttatatgcacataagacaataaatgactaaattccaaatggaatgatataaattcagaaagtactataggttttattctcaaaattgagccttatcagctgaaatttttcatgtaaaatacagttcagctcgatattgaaaagtgagtaaaatgtaaaaagaaaaaagtaagattatgatatttgaagcaaaaacataatctgggtgttggggtcttgaagtggttcttaagtagcactggccttcctcggtcaagatctaagacttgatcttagaagaaaaggaaaataaaaagcctgagagataaccctctacctacatcagtagagcaagcttggctgcctacattcaatcccagaatccacatacagccacaggaacagaacctcctccaaacagttgtcctctgacacacacacacacacacacacacacacacacacacacacagacacacacacacacacgcacacacacacagacacacacacacacacacacacacacggacatatcatatacacatgcacaatagaatttcaaacaataaaaatgataactgagaaaataattttataactcttggttggaaggtgtaacatagtggtaaagtcagaaagagctctgtgactctcatgccttcgttctaaacttaaaaaaaaagatgtaagaagataagaacaacaccttgccaggtcactaatttctttagtcttgagtaggaaagaaggaagaaagatactacaatcctgcccatacacggtttgatagtcccattggtcctggtttgagatgcaaaccaaggactatcttatcaacaggatgactaatctctgtggggcagaataagaaataaggtaagaaagaggcaagacaggattagaaaactgatttggaaactaggtatacaaaaggtacattcttactaaccccaagttccacagcctggaaatcaacagcgtgaagaagtacataagataaagatctgagcctggagccagtaggacaagcaaagttccacttgtcaaatgggacacccgtggggtcacaatcgggagctctactgtttgtctaagatctatattttgagggcttttcggagtctccacattgcttcagttagaacttgaaagaagtaagcaaaaatgaagttgattaagtaaaacctattggaagaaaaatacaatttttgtatctctgcctaaactaattatagcagtatttactgaatcactgccttgcttcagaaaagtacactattaagatatgctcttactataattgtacaaatgaggaaactgagatttaccaagtttgattaatttttccacaaatacttaataagtgttagagatagaacttgaattgggaccatctgttcttaaaatccaaggccaaaattcattcaacacaggcaagtgtctcctaatgttacagagataatggtgaagaaaatagacattgtcactcctggaccttataatctaagggatatagagtggataataatgaaatggtcagacaaagaacacacactttcaatcttactatcatgcgagagaagcaccggatgctctaagagcagcatctaaatgagaatagaaatttccagaatcctttctgaggaagtggcatttgatctagtatccggaaatataaagcaagaggtgaggttgggtactaggaaaagagtccaggcagggggagaaacatatttaaaggccctaaatagagttggaagaagagagtgaagaaaacaacccaatctgcaaatggaaatatacccagggcctgataattgtaggtcctttgtagccgccatgttaaagattttgattctctttttttttttttaaggacatttggaaaacaaactaaagaaagaatatgttataattcttttattttagaaagatatgggacgtttatcataagaattgggaatacagtcatgtaataaacagtgtatatagctattttattggtagttcttcgaaacagtacagttaccttcagtgggtaagttcttaaacaaactgttgcacatacatatcatgagatacattcatcactaaaaagaaatgagcaacttgaataaatttcaaggatattttactgaataaaaactaaaatggccaatgtcgagatagcaaactattatctatatgcagcactcttgtactgacaacattatactgctagagaacaaagttgtggttcatggagtcagaaaaaggaatagaggtggatgtggtcatggctataaaagaagtatgaaggcgtttgcaatagatgagaggtaccagctcaaggtcatcagtatgtggtggtagaagatgctgttggaatgaataaaaaatgtccaaatgcgggtcttgattgagaagccaaaaatgaaaacataagcaacttttactgttacctggggagagaatcaaaccagtaaagtgcacaggggtaaggaagagccaaaagagttgtaggaaaccaggaaacatgagggcagaaggcaagggaagagtgtttcctgagagaagagggaagggcaaggttgaaacccgtgcattcagtgaatctggttgtagattactgttgaccttagcaaaacctacttgtttggagtggtagaaagataacttgtttatgtttaaatgaggagactgagaggcgaagaaacacgggctacaaatatggataactataaggtaacttattgtgacagcaaggaaaatgaactacgtggtggcttgagggcaaacacaggtcgaaagaagtttttgagaataaaagcattgatggttcacatgcatgttggaagcctacaggtgagaggagagattcagtgctcaggagagaaaggaagatgccatatttagtactagatggttgtttataagactagaatgtgagcataagaagaggggcacctattatttgaaggaagaagcaagagcagatgccagcccttgtatcagtttgatgctgacaaatgatgaggtttcccacataatggctcctaaggggatgagagcctgccaagagtaagtggtgaagagatctgatgaacggtgaggtttcaagtagttctgggcacaagggcgtttacaagttgaccaaagcagctctttccttggcacatagaagacacagctgcttctcctctccatagccaggcatgatgggtacccatgctttatctttctctacagctgctttagctgctcatgaggtgccttaaagatcccattctctctcccatctgattaaacgtgaaacattcctgctgcttgccacacttctaatgtgcatcacacatgcatacatttgcatgacaattctgatttctcccatcattttactaataaacgatcaattacgaataagtagataaactactcaatgtgtggtaaaatgtgaatttcctcttaaattttaaaaaactggcatccagtgacacaaaacagctatttaatttgacagaaagactagagaggaaagagaaaaaggaaggaaaatagagaaggaaaactagtgaaccatagaagacctgatacaacctcatctttcttgttcccatttgagggagataaacaaggctctatcgcttaatggttatctacattggtggcctgaatgagatgtcccccataaggtcatatagatgaatgcgcactcatcagagagtggcactgtttgagaagaatatacaaggattaggaggtgtggcctagttgggagaggtgtggccttgggagaggtgtgtatccacaggcgtgggtggagtttgtatgggtgggtggggggnnnnnnnnnnnnnnnnnnnnnnnnnnnnnnnnnnnnnnnnnnnnnnnnnnnnnnnnnnnnnnnnnnnnnnnnnnnnnnnnnnnnnnnnnnnnnnnnnnnnnnnnnnnnnnnnnnnnnnnnnnnnnnnnnnnnnctccacgaatggcttccaggcctggagacataccaagtactgtaggttactcgggttcctgctggaactgtgagaagatgcccagagcgtccgagggaaggatggctcctgtacccagagatgccgagctgtctaactccctggggaagaaggcaacagtggcctttcccatccgagctcctgccactctgctggctccctttagaaagtgacattaggaccatttgactcaaaactaaattgcagatacatctggggtagaatctggcagctgtcgagtgatgcagctgtattttttaaaaatatttacttctttcatggttctataatttacatttatcacaaaatatcaaaaagtataatataaacagaaagcatccataaccccatgcactatgtagaaaaaaaactgttattaacatacgttggtcaccttcttgtctctgctctagattttaagataattaagcatgtagaatgtatagaattctgtaatattttaacttgatagtatatagtaaatactccttctgtaaatacaggctctttgtaatatcaccgtaatatataaactcctaccctataaaacgtccagaatttaacctaatagggacctgcaagtatttagggtatttgtaatatctagacttctatattttaaaattctttaaagtagaaactgtactacagcttatcaagctggagaaatggaaagtggagacctaaagcaaggggtcatgttacaaactgaggagaaaggcagtttcgcctataaaggaagcagctgtgggagcaggagagatggctcagtggttaagagcacgggctgctcttccagaggtcctgagttcaattccccgaaaccagatggtggctcacaaccatctgtaatgggatctgatgccctcctctggtgtgtctgaagacagctgcagtgtagtcatatacataaaataaataaataaatcttaaaataagaaaagcaaacagcgttgccatgtgagtgccgaggaaaagctcactgggtttgggggcagttggaggttttacctgaactcttcttcccccaaaaataaatgcttcaatttttcattctaacaattatgcacattttagtgttttaatacacttgatcttagctcaaaggataagaagacataggtgtttttactaatttgtgcagtaaaactcttcaaaatctcataccccagagacgatctctataaatacatgagaaataaactttcatgcatatctatttatctgtttcttttttttctatttcccctttatttctttccaaaatgaaaggaaaacgaactgttttgtagtctgcttttccactcagcactttaagtcatttgccatgttaataaatacagatctgcatgatcttgacagcaatattgtactccagtgtatggaaaatatactgactaagtcgctcattgatggacacttgtgataattagagctgtttccttacgttaaaatactgctacaatagctgtctttatatgcacacatgcatacatattccttaacacagtttatggataattttcttaaaataaatttaaagtggaggaattattaaaataaaatgcatatgtcactgcactgctctgcagtaaggttccatcaatttatacttccatcaaccaaggaagatactacccctttcactgtggcttcattaattctgtacttgcaactggataagtaaagcatttttttaactaaggatatggaatatattttccaagcataaaacccaaacctggatactttcaactgaattaaatttcattacatggaagtaaaattgctatagaaaaattttgttaacctggaaaattatttttgagaattctctaataccttaagagtaactataaatcaacaacaaaaatgtaaatttttaaaaatttttattaatacaatatatatgattttatattttaatggttaactttcactatattattttaaatcatcatattattcaaaattgtgttattaatttaaatttttagactttaaagtaaaatttggaaagggcagttgatcgacctgacagcctgtggtagctgatcctcattcttttttttaattttttttttttttggtacttatttactttacaccccactcactgccccctccaggtttcttttttttttcttcttcttcttttcttttctttttctttcccgcattttttattagatattttcttcacttacatttcaaatgctatcccaaaagtcctctataccctcccccagccctactcccctacccacccactcccacttcttggacctgtcattcccctgtaccggggcatataaagtttgcaagaccaaggggcctctcttcctagtgatagccaactaggccatcttctgctacatatgcagctagagacatgagctctgaagggtactggtgagttcatattgttgttccacctatagggttgcagaccccttcagctccctgggtactttctctagctcctatattgggggccctgtgttccgtcctatagatgactgtgagcatccacttctgtatttgccaggcactggcaaagcctcacaggagacagctatatcagggttccttcagcaaaatcttgctgtcatatgcaatagtgtctgcgtttggtagctgattatgggatggacccccggatggggcagtctctggacagttcatcctttcgtcttagctccaaactttgtctctgcaactccttccgtggatattttattccgtatcctagggaggaatgaagtatccacgcgttggtcttccatcaggtttcattttttaattgcaaaaacagtgctcactaaaatcttttaaggtcagccacctaaggctttcttcccccaactctgacaaccacacccaacctcactatccctgcggtgctatgggaaacaaagcaacaatctggaaacttaaagtgtttctgcagggggggttagcatttcctggctgtgtatattcctgtgtttatctggcaacccatcctacaaattgttcactcatgcaagtatagagtataaagtgttcatctgcactctcctgtcagactccaggatcaaaaaattattgggaatggtaaaacacacactggcgacattgcctgatccatatctccaaggcaggattgacactgttctcccaccagatgtagacagagatttctggatgtttgctagaggccatatcaccggtgtcctttacctttcccctggcctctgcctccccttgtgtattgctacatacttaatgaagtggaatctgttttccagcaacttagggaaagtgaaagtgccacactgacagcgtcatcccagcatccacagcacgcactgtgacaggttgtcttccgtgattcgggatagagagcatctgggctctcagggcacattctctgggcttttcaaaggagcaggagttgtacaaagctgtttgagtgataattggaacattccttcagcacaagaagtgcagttgcagatgatagatgggcgggttattccagggtactttttcttcccttcccagactgtgtccgtgaaagtgctgtgccttggatccttactcgtcatttcttctggtatgaaatgttgaaaacgaatgaagcatccattcctgaccattatttggaagttaatttcaagatatttgttcagggctagcctctttgcctttttacatgatgaaaagctaaaacaggttctcctttagtccctcttcataaatgtctggtcttttttggtacatggaacacaattatcacctctaatttaaaactcattctttattttaagtgatagaatcaagtgtcttatagagaacgtgaataaaaggtgtgctgaagtcctttgatagtatccatcagagtggctctcacatactgatcaaggacacagaaaaaggagtaatataaggcctcctatcaggatatctggggagtagagactctgtctccatccatggccaccatgcttgaatcatattcacttgatttgctgtccatcagtagctctacaccatgatccactgacacaggcctacagcactgcactttcaggtaaagaatacaaggaatctaaataccacatagcttacctagtgtgggtaaagtacctctggatagtgtgtgtgtgtgtgtgtgtgtgtgtgtgtgtgtgtccctccactttcttcaacactcagtagactatatagggaggccatgtcacttatccccaattctttatctacctagacaaaaggggcagaggcagctctaacatatagattcttatctggaaaactgttttagatatctgaagctgaaggaaactgagagaaatcatactgactactattatttggagtgtctccctttgtctaatccactaaagcaaacacttagaagacatccttttgagctatgggtcaacactgttttcctagaaaacagtgttgtagaggcttgcgcacttatattcaagataaatcctttttccatcttcttagttcactatactaaaatacccaagtctggcccatctaaacttctgtgtttgtttgtgtagttataggaattaagctctccgagatcaagattttggcagactcactttctgatgtggggttgtgtacttttcgtcattctggatctttatgtggccaaggagagggaagcagcttcctcctacagctgcataagggtcttgttggtgcatgaaggtctgatccccaagctcctctaggcctccctcccactacaatcacattggctacttcactccaatataccagttcaagaggacactctccatcaccagccaagaaacgaaaaacagcatagtcattctggttagtttcagcttttctcaataaaaggtgtgttctttagcatcgagacagaagctctatatggggaacctacccgaaatgttcatgggctttgaagcaggaaaagatgcaaataggagccaggaaaaccttcactgcaccagtcacccagaaatgagttagatatgagtcaggatgggatcaaaagcctgtgtgcaagccacacctgtgatcccagcagtgaagggtaaaagcagaaggttccagagtttaaggccaccttcagtcctgactacctgggagcctagaaaaagaaggttgttgagttcaaggcttcagcccaggcaaactgggagctgtctcaaaaatcaaaaacaaacaaagcacacactttaaacactcatttattcggacaatgtcaggttgtagattgttctcatcttataccaaaatcattgctgtaaatatgtcttcctctataaagaaagattcctctttaccacattaatataattacatcgggatagtattcaacttgccagtcacaagtgatttgaacaggtgaacacagggtctaagtgatgtaggaggtatgaagtcagagattggaatcttggttatcttccaaaactatcctagattactcacattactttcattttcagcagtactcattgataagtgctcttcattttgttatgttggtattattcctaggtcatttatcatctgcacaccttcatctgtgtgccagggcctcgagggactaccatagttgaacacacttgcaggcacacagaaacacactcacactttctctattgatctgggtttttcttctgcccattagatgcattacaaatctgcttttaatgggcctctctgtatccccacagaaatctttctggtgctctcctggtcccaacatttgctgggtgcacatttaatatgtgttagcttactgcctgaagatggaatcagggacatctacctgcacatgacagtgctttggctctggcagttgcagaacttaatgtatgtatcagtaatgaaaatcttaattaagaaagctgcatcattgtccacgaacactcatttttctccccctgcaaagccctttgtgtattgcagtatatacctggtccagacagacagagccctcgaagagcttgtctggcagatcttcttttgattattaacagctagcaaatgacaaagtctcacttccttttgtcttgaagccgaggcttgaaacagcaaaggacacaatgtactgtacagtttgtttgtgttttttgaaacttgcctttattacggtggtttaaaaatccggcagtgttgatcaaaactaatttaggtaacttagagttagcaaaacactagcagatgcatatttacacacacactctcagagaactgaaatgttccctatagaaataatgcaaagcatgagaagggacagtctcaagctgtctgctcaggtttctgggacctttggtctccaaagccaggaagctgcaatgtccccatttgtgtgaccttagcagttacttctctgcctatgccagtgtgtgttggccagtttgccatgttgttgagtaggaaataggagctttggaatgtggagtaactttgtacagacaataataactatacccataaaatctcaaagacttcaagaaagcccttttgaaaaggtggcccttaatttaattatctttatgaaacagtactcaattgtattttaataatacccaaatcataaactccaaaataaaaattaacttatgttaaagtgatttaaaatcttcaaagcatttcattttgttcctgttaagtctatgaccttaacccataacctgcatgttaagagcgaatctcatgttctcgcccagttatggattcttcagccttctacattccctgggcttcacgactgcactgttaacccgtttctggaagagtaatgtaagaaactgagttgagctcaagccatggagttatgtaacacttcctaatggactgaagacctaaagatggtcagccgtgaatctttaggacctgctgtctgcatgctgtgcatgtatgtccttcagtctgactgggggtgggaggtcatgctacactgggtggtgcttgtgtgctctttatttcatctagttcttgaaatttcacatgctttatctcatttattttcaaaaccactagaaagtatataatggtcagttttccaggtttctaaatcaagaaaaaaaagcttgtataaattttctctttgtgcatcataaaaaatataaagaaggcttcattgtggggaagtcactttcaaggagtatgactaattaatatctcagagttacagtcataacatgtttaattaaggttaaatatgaaaagtaaataagaaggaaatggaactttttgtagttggaccacaccccaataagatatagaaaagaacctatcaggatgcatgcatgctagacaagaaaacggtagacagattgcattagtctgaataatttcccttttcatgaactatctgttaaccagggccaccataagccctaaatcaactggcaagtgcttgccataggagcataatgtaggttcatggtgtaaggtatagaagaagctccagaaatgtgtgagaaagaaaatgagtgattgcccatgaacaattaaagggtaactcaggtgctattgcagagactaactcaaaagaacactacttctttttaatgtctaaatttttcaattatgttttggagtggggcatggatgagtcaaacatatatatcaaggtcagagggtggtttaagagaatatgtgaattggggtggactccttccactgtggggtccagaaggatcaaactcaagttgtcaagctaaacacagcgtttttaaccctctgagtgaataattttcttaatttttgaaagtccttaaaaaaataaaataaaataaaaaagaaagtccttgattacaagttagaaatccaatacagtactaggtgttggacttcagttttccaaaatgtaagttgttgtggaattttgaaaattctaaatatctgaaatttgggtagattggttactaccatctgtgaagcacataatcacacatgcacacataaacaatcatacatatgcacacacacacccacaatcacaatgtaaaatatgtttcctcctatgagtcatcaataaaaaggcttgagaatcataaagatctgtagatcaaggtaagatctgccccgattggcatttatctaccctttgcttaaaattcaagagtagtgagactagactccctgaacgtgacagccttctcataactgactcacaactcttcatctcagctaacacttcattgtgtttcctcagttttcaaatattacacacacacacacgtgcacacatcacattgtacatgtaaaagtgagagaagaaatttcaaggtcagtttttgcttggcagtaagcacttttgcccactgagccatgtcaccagcctggcctcctcaccactgcagtgcctgaagtattatatattgtattctctgtggtttagtctacaagctaagggatcaaactggcctagagcactcgggtgtcttgaagctccagccagaggcctttagaaagcatactagctgactgtcaggatgctcttgggccaccctttgctctcacatggaaacacgcccgctagctgtgctgtaagtgatccttgcagcaagtatgtgcagtagttgtcctagagcatcggctttacgtcaatgcttaatacgacactcagagttaggtctgtttaaatgcctgctacttccttactccataagtacctcaaaacacagtaatagcatctctttctatgcaaacctctgtacataaaaaggtttacattttaaaacaaacattttttttgagctttatccaaattcaaaaaaagcatctgaaaattttaacagctgaaaaacactttctccttgctgggaaaacttaaaccttgctaggttttatgcaacaacaacaaaaaaaaaaaggcaagaaagaaagacttctgtgctgagaagcagcgtgagaaatctcagcatgagaggttgttggaattgtttttcttcatagagctaaaaccagtccttgggtttaaagtgatgccacagtatacatacgctttgtcaggaacaaaggattttttcatcaaatctaatttcaagggcatcttgaataaaaaatagaagggctagagaaaggctacttcagcggcgatccagtgtctagaagcagaggttgagcacatcgttgtatcaacaaggtctggagacactgctagctctgggtgcttgtagctgcccataaaccctgaagcggcctattttattattgtctcgctcaggccttacttagcccagagtgtctcacaagggaagcactgctctgggatggtgcgctggactttgtttctgtttgtttcagcacttcagtaaatggtctcaagaaatggtctgttatctgccatcatgacctgcatgcatttgctgaacagtttttcgaataaaacaaaattctgtggcagtttctagaaacctgaaccattttcaagacaatatccaatgagaaatgcccagagacatatccatatgaatgcgtgatgaggacacacatatgttactctggattcctaagctcaggacgatgaaacgaggctagacaatacaaacaggaagattgaacttgtttatgtatttataacccatgctctgctcttaacactatacctatttggaagtgactataaaatagacccacatgtgtgtttaacaaaataatcttgttcctcttaatagtccctaagggataaaaaataacacaaatttgggcttatttgtttgcgtttcaggcagcactgttgttgtttttctgtctttactttttgagacagactggctatatagatcaggctgacctgttactcataatatagcttaaactggtcttaaattcacagttattctcctgcctcaacctacccagtgctacatagatgtaaatgaccacacctgacacaaagcatgaagtttttaacatcatcatggctagttgtaggaacagtgaccaaggcagtcatgggtgggaggagtcatgcagcagcatacctctcgtacagacacggtttttataaggccttcctggaagacaagcttagacatttcaagacctcagaaaattttttctgcaccttctgtgctccaaattgagttgagtttgcatcgtgtttcagtataactgagtagcaggctgccaaattccctgccttcctattcaccaaaatccaaaatagaactcacaaaaactccttccttctcatccctcttttaaaaacaccccactgtgtccccccagggaggaagaagcaaaaaaaaaaattccagtaaatagagccagccctgaaagagaaatccccagctgtagctctagcactttgctcagtactgtgagcttgctagagctggcacattttttataatacagatgcataaatgtctctctgaggcagaggaatccagtgttgcctgatgccttggtctaagtatattgcacaacctagaacaaaagaccccgttttccacctcactttatatatttttaattgtgaccttctataactgattttacataaattttggagaaaacaacctttgttgagactttcacagcattcttccaaatggaggctttcagatatttacagtgatatatgtaaatttggacttctttaaaaatgcatatttgtttaataatgacttatttcagaaaaggttatgtgatatattaactataaatagttgtttaaaaccaagctatgtgttaaaattttgagaccatgagctatatgtacatttttaaggtatagcttgtgttctgagtaccctttttcatttcttcaaaattcatttatagaataaatacttaaatagataacactgatgaaagtgaaagaaaggaagaaagagtataccattcgcaaaagtccgctcaagcatccaaaattaggacagattttggctaaagttcaaagatgctctcaaggataaagattagattacctgaagctggacagctaacatacacctgtaaccccaatattggacagacagaggcaggagagtggagttcaagtccagttttgtctgtgtagcaggttgttggagcctaagcttcagaaaactctgaaacaagagcagaaaatgagaatgacccaagtctttaaacaccagagtgcaacaagagccatttgtacagggatggttctgggactcagacctatatttgagaatagcctctgctaattcctctgtcctttgggtaacttaactcatcattaagcttcagactatttagctataaaataagaatagtaactcttgtggttgatagtgctcacaaccatccaaattattttaacattgatagtatctttaggataaatgtttagcctagaaagagatgaagcacacttaaagtacattatttctagtatagttctaagtttataacctttttgttagaggcattttaaagatacacaaaaatggagataatgtcatagtgaacctttgtgaatcacttcactgtgcttttacaattaccagatcatgttaaatgtgtgtatatatatatatatatatatatatatatatatatatatatacatacatatatatgtctgtgtgtgtgtgtgtgtgtgtgtgtgtgtgtgtgtacgtatataatatatatgagataagttagatcttaaactacaagggagagtgcttaaacttagtatgacatatccattaaatagaatttttgagacattaaatgtttatgaagatcttagaatagcatgggccataatatatatatttaattcaaaggcaactaatttaattgtgcatatgttattatcataatcattttccaaaaataagagattgtgaatcctagatatatgggaggttttagatattttctcttactcttttagtatattatcaagttgtataccatgggcagattttattagaaaatattaacactttgctaatattcagaagaatatctgcacatattcagatataaagagaatgtatctacctgactttattatggaaatttggcttatattttaaactgttccatgtaacagaagtttatcctcccccctttagtaaatatttcttatgttactaatttcaagcttgaggtacagcctcagtgttatgtctatgggtttttttagaacttgcctcaattcaaaatattctaaatggttcatatttcttatgttgaacaacaataaatttttgtttctgtttgtgctaatgggggtgcagaattgacagtgtacatttgagcgttatttctgatctcccagctgttccatgtggccttaactacatagtgcttattctaaaagattgcttgcttctttcttatttacccctgaactgcagtaatatttttagtcctggtgtcttctttttatagtcttcttgtctcatctttggctatcgggttactctttgtacaggcaagcctctgagagtctcattttttccttgattctttacttctaatctgctttggtcacgaaggcaagcatgcacctatgtttaggctgagtgtaaagccacgcctttcctgttctcatgaaaagcacagcaatatgctcagtgctggagagaataaactgatcaccaagacacaaatcctaccttaaagaagctttcacctggcaggagaggtggatatgttcctatctagctagaatctgtaagatgggtagtacaggtaaagtattcttggagttcaaaggagggctagccttaagctttgccatagacaggaaaatgagtgtgcaccgaggaaagcaaggatttgaacacacaaaggttaaagggaggcccatctcggaagccataagcaaagtgtggaggaatcaaaggaataaagaatctgtaaagaagtggttgtgtttaagtagagcataaagcatgagaagatgagagatgagtagtagaagggaagtggcccaggtggacttggttaccagcccaaggaacctgaactttcttcattgcacaaaggggagctattgaaagttttcagtaggctagtatcacagtagagctgtgcctccagaagattaatctggcaacagtgaggaaaatagattggagtggagagaaaccagaggacagaggaaagatgggagactcacggcaatccaggcaaaaaggcaatgtgggccctaagtagggcatgggcagagggactgagcagagacagcactgatttatgacacatggcaggagagaattaatgcattatatttggaagccagggagagcccgacaccaaagacatctctatgattttgagcctgagcggagccataaacagaagcagggcagcagaggaggagcaggcctgggagaggagagcaccagtttaatttcatacacactgagtggtgtggagtgggtatccatgggctgcctgctgggctttgggagacaggagactacagggcagagagggaaagcggggcttgggtatgagcctttggagtcatctctgcctcactggactgagagcaagcacagagctaatcgctgcagcctgtagagtttgcgggtggcctacttcatgtcctttctgctgcttgctcttcattctgccctccattccttcctttctctcttttcatctgttcttaggagggagatgccacacaagttgcttacaaagaagtgaatcacggattcatccaaacataaactatattctaaaataaagtattttctaatgtatctaaggaaaccagttccatatcatctatagtcttgactgtcacataaaaagtattcctgtgtgaccatagagaagtcactggactccttatcattcaggttcttagattactcataagtccaatgaagaaactggtaaggtccctggtctgtataattggctacatgtagcccaaaccgacattatgtcagaataacttagggaagacagaggaaggggccaaggttgaaggatctatctgctttaaacttcctggcatgattgtgatatacagcctgggctacataacctgctaggttcattccatctcttacattcattctaaagctttatcaatatttagacaaaatgtgtatttccatagctcataagtgagaaaacatatccaaaatgcaaatttactgtcaaaatcagttcatgtataacaaaatactcccctctctcctttaagttagaagatgatatatatttgaaatgtatttgaaaagcactttaatttagagccctccagggatggtacgagctgggagttgggagaggaggaaagccaggcgagctgagctgcaggctcccatgttcatttccagccacacccaggtcaattgtctccatccctgtagttcaaagatttctgctctgcaattgatttcagagctttcgcagatcaagttgagtcatgtccttgtgttgcttctgactgaccctgtcacaatgtatatataagcatttcagaagtaactcttcccagactgggtgctagtctagagtagaggccagtgtctgtaacacagccctgtctgttcccatatctcctaatgtaactttcctgtagctcacatggttccagcatcagaaggaccctcacagtgtactttctaatgtcccgatgaaaactcgagtatgctaggctggccacaaaggaaggaaggtcaggatgaagacatccagtttgtctccactttctagactttttttccagaggggactttggtttcaggatatgacacactaacctgactggcttataatttaatagattagaatttggagatctaaaattatcaacttccaaattaattttgacattccattttcttaatgagtgttggttgagaaggttctaaaactaggaattctcttcggttcttaagtcaatcctacctacaaccaaaactctagactaaatgcagagcagggttaagttgaggatattagtggagccctgaagagcatccctaggcaaagagtctgtggtcctcctttgtggttccccccactcctcttcttcccgtttccttccccagactgcgcttccctggctttacttccactcggttaggtgagctggcaacatcactaaggtaatttatcagaaggcttgcgtgaggtttgccatcttagggaaatttgtgattcaaaaaaagtattttgttggacagttagggttccccacctccccctcctcaagctaagtatatgtaaagacagaaaatatttagcagggctgtatttcctgccccagtgtacaaaactgtataagaacatgaaattatccaagctccctacatctaaagggtcactgatacttgagcttgcattctccctctcagatctacatccctgagatgcagtaggatgcatgtgggattgtttcatccattctggacctacctactccagatctggtccctgttgagtttcttagactcaaccacatcttccacgtataccataatactgctccttgcttctgtctctgtggactttgttcatatacatttacctattacttagcaaagcagagaagacacaagctgtggagtcaaatgcaattactagacatgaccttgagccagtcatttatctactctaagcctatttcctaatatataaactgggagcatgatgaagattaaacatgataagtggataagatcagagatagttcattatgaatttaatatatgtgttattatcactaattactatctctgcctcctccaacaatttggatttagagtcctcttactgattacctaaaaggatctatttcttcacggactgtttgttatgtgctggtcagtgctagtctcctagtctacattttataaacaaaatagataaagacagagaccaaacatttcctgaaccaagacttaggacacaattttatcaacaataaaaggcaagatgtgaggacgaggatgtagctccataggtggattgctcggtaatgtagacaaagtcctgagtctgatagccaatactgcataaatccagtatggtagtacacacctgtaatcccagcactcaaaacaggaagacaaatggatcagaaataaaaataaaataaaatatattaaaaggcagaatatgaaaccatgaatcttcagaaaatcaaaggctgtcattcttataagtatccttgaatatgaattccatatactagacaatacaannnnnnnnnnnnnnnnnnnnnnnnnnnnnnnnnnnnnnnnnnnnnnnnnnnnnnnnnnnnnnnnnnnnnnnnnnnnnnnnnnnnnnnnnnnnnnnnnnnnnnnnnnnnnnnnnnnnnnnnnnnnnnnnnnnnnnnnnnnnnnnnnnnnnnnnnnnnnnnnnnnnnnnnnnnnnnnnnnnnnaataaatggtatttcctgaaaatccaaagccaagtttctcttcaagatgaaaaaggagctgtaattatgcctactttccacatataaccaagctctataatataaaaataaacaaaaacttatctaactgctatagaacatggaaataaacattttctgtaattactttttaaccccaattttccaactaagtatacacagatagccggattgactataaattaagtacctttcaacatagatttctaaaaagggaattttcaaaggctttctcatggactttagcagaagaatcttctgttattatgtaagggaaatagcatgctctgagactatcattaaaagaaatgatcagctaacattttagggcaaagtataaaagcacctagtgaaaccacactccaagggaatcccattccaatgtatttaatgcctagcgtccaagtagaaatcctgctatctaactagatcttgaacatttcagataagttgagaaattatgtgctgagtattttttgtttcttatttctaatgaatcagtaattttgaccttcgttccatatgcctctttaatttatggtgaataaaataatactgatatttcaaaaattaatacacagtctcaagccaccaagtttccaaattatgatatttccaatggcaaatgaaataacatgctgtccatgcagttagtgatttgaggcaatttgaacatcatgataagagaggggggaattacaagcagtgttataattaaaggtctgttgattcttccgtttaaatgccattgttgaaagatttttcactcagatgtcaaagtctgtggccagccaaaacttggcatgctagaaccaagcccagggaaacattgtgttctacagattgaaaaaccaaaatctgttaagaacagaaatgttgggcttggtctgatttctcatgaatcagaaccagaacatagccaaataccacctcctctttataaaaggaagtggtgcaggtggataccaatgggaaatgtttgttcccatggataatgaacggaaattatcattaggtagcaacatagtgccagggttacagtcatattattaaagcatgtttgtttgaagttcaaagtgagttagaaacctcttctggtcagttctttgtgtgtgtgcaatggggagtggggtttccatgcctcccgaggcttacagtgggatcccagctctctgtatttcattcctattaggagaacacctgcaacagagcgctgtttgcttcactcaagaaatagatccccaagtactgtctctctctagaaagagagctcccgatacctcgttcccctttcttttctttggaagctataaacccatggcctcgagctgcatctacctaagtctataatttttgttcttattttatatttgatctgtggaatattttaaaataattagacccagattttaaatacaaagagatttccaaactatccagatttttctggcttctctcgaaaacttgaagatctggcagcgtgagagccgcatccgcacgtggcaccggcaccggaacagagtggcagctgctcccttcagacaagccgtgttctctccagcttgacatccccatcgctccatatttatgtcacacccacttctctcgcttcccctaccaccatggctcagttctgaaggactgagacttccctttcatcgcttgtggtggttgagtgaagatgccttacctggctgtaatattattaatgctctaagattgttccactaaatgacaccaatgcagaggcttttctgagtataatactcagaaaaggatcactcaaaatgatgaaaatcagatggcaagaaaaatggctacaaatagggccatacaataccatatattgataaattcacaaaatagaatactgtttagaatgttaaatatatgcctcaaaggaatacaggttacaaaacaatatgtacaagatttctgttttgtaggaggaaaatacacaggaaaaggctaaagagatatgtaagggaagtgttaaaaatgcatgtattttaccaaagtgcttataaacttgaattcattagtagacccaagagtagcttttggaggtctcttatgtggcctccatcactgattttgacctacacttgaagctgttttccagttctctagctaaagctgttttgattcccttgcctctattttttatacatgggtacaataaaaaataagattcctatagttgttttaattaagagaaaagctatccttgtttgcctacatgctagagtgccaacaagtcaaaacaagaaccccgtttcctgtgctggccttgaatctgcttgttctaccaaagtacttttggacgacacaaagaaattactcaaatgcaaaaaaaaaaagatatgggacagaaaataacacattaaatcgaacttaacacaaactcttaaaggccggaacctaaacttatcacagtaaagctatgcaggaagaagcaatgcttccaggtagaaggcagctaactaagcgtttgtggaaagtctactggtcctaatacttagcacaatgtctggcagataggaaaggagcaaaaactgctaaacaaaattcaaataaattcacactcctaccaaggaataattttaacatttagatgaagaatctcagttgtcttttaaataaaaataaaataatgatgtttgaattttactgactgctcttgaagcaccaatatcacgcttccaagctagtttaatgcaatatttttaatgcagttagcttataattttgtttctgcatgagcctagagaaagactaaggaaaggaaaaagagacagtcttttcaaagatgagtttaacaaggaagactctagctcttcagtatacttggcagtaccagcttcattgtttctgacttggcccttgaccaccaacctctatttcttgaagcattctttacttttgtgcttcagagcctctgttttcatggttcaccagttcatcttgtggcccttcttgctacttcatccatgtccccttcatcgactagagatgtaagtcttcgttgtccctctctattttcttggaataatagcagcttttcaaactttctcccaaaatatctgaatctgaaaccaacctgtagaatctggaagcttcctacagaaaactaactatttccaagtggatgtcctgtccatggcatctctaactcctgctctgaacctctgagtgttatagaagctagtcaggtcgatcccaaacacattgtctacttctctttcctcgtgctgtaatttactccaaatcccttgcctaaaccacatccctccaatttctaattgttgaattttcccccatattctaaagtccatctcatacgcttagtcttctttgatatttctcaagccattgaaccctagagaattgtattagccagtcttataattccttcctcatttgttttaatcatgtgctggttatagtctaagtataaggatattggtttcttactgatctttggagctactagctcctagtatggccctttgctctcaatggacattcattccatatgtatttcattaagttgaatgtgtatacatgttatgacttgattaatagagaaaacccaccttgctcaaaatatctcctcttcgttataatatcttgttgggtgttttctttgctttagatgtggggatttttctctaaatttttggttcctgaaagtaaactgttcactgggtaacaattgaattttgcgtctgcagtgatcatctcctaaaataataagataggtacattgtggagggtagagactaggaaagaggccatgaaaaaggcgagagattggactttattccttaactagttgagtgcctcatttatttcaactgtaaacctatgataccagtaagttatacattgaaaagatgctatgagatgtagccaaatagatgtaaattattgagaataatagctgacactttgtaaatgctaataactaacatctttcatgaaatagtcatgtgtcacggaagagatagatagatagatagatagatagatagatagatagatagatagatagatcagtccaaatatacccatagatatatagatatagtcatggaagatgtagataggtagatagtccaaatatacccatatatagtaactgtacatatattattaatagataatacatacatgtattttatatagtaattattttaatcattattcctttcatggcaagaaacctgtgagcaatccacacagggaccctaaattcctggtgatacaggatggaaataagacaggcctggtgtggagcatacttctgctgccacctaagtgtgcaggttatagagtctctgaacttgtaagaacctctgtggcttcccctggaagcaggggtccccctacctctcagtctgagctgagggctcagctgaggaagtctgagattgactttcttcttgtgccgactgctatcttcttcctcaacttcacattcattttcttgacaaattagatttcagatttttttgttctgaacaaacttagaagaaatgactggcactatttcagaaaagtggtggcagcaccagctactaatttcaaattattaataatttaatataatagtgaaaagttgaaatatgtaccaagcctaatggagaacaaatatgcaccaaactgtagctaaatccttaatctagaacaaacttactgtccggtcaagattcattatttttttttcttcttttgcaaaatgtctttcacctatgggaatcattataccaatgaaattttagtggtgatagtttgtttacaaaagagaaattagatttttttaattgaaaaaaaatatcttctgcttagtcctatttgaaggaaagagttcagaaggagaagcaaaaaaattaaaattaaaatttaaaaaaaatccagttttgaaagtatctaccaactccaggccatctgtgtctgaaaagagaaagccttagcatgtcccttcgtgtgtttagccttgttcttgctgtgctgtgatgtggcacctaatgctccaggggacctaaagcaagtgtgacaaatgcaaccaaaagtctcatgaaaatgagcctcttaacagcgtctgagctggtctgcaatggcctcaggaaatccccccagctattctcgtccttttatccattacattctctgactcaaaaggaaacctcacttcacctccttgaccagaattgagcagacattgatttggctacctggtgctttatttattcattcattagtcttcaccatttttactccagtagaacaaaggaatgtatctttctttgcattaattttaaagatgtgcaaatgcatgtctgtcaagtatgcatatttatgtttatgtaattttatgaatagcttgctttaacttaaaatatttccagtcaaaagtgtagcacatagaacctcacggtcaacgtcattgtgcagaatgactgtacttgacacattagttgaattcataaaaatcttgcacataaagtgagcattttaaaagagaatcatgttttctattcacttctataattagtcaggttaagtgtcacatgggaaaaataagtggcccagtgcataattttttttaaaaattaagaattgcaactctcacttcagtgataatgatgcatttatctatagacacattgtgtgcattaattgcccccaagaaaagccaataagaagtgaatccaattaaacagcagatagtttggaagcaaatgctctgtataaaccactggtggaagctgaaggaagctctgagagtgtaagttaggacttgttctcctagttaagagtgcacagcagaaaaggtaggactgagtacacagacatttaaacaacagctcatgatattcacatgtattctctgcagaactgcattaatgatttataataaaatataccatactttcccttctatttacaggactcggagtgggtaccacattctcatatagttgcctaaataggattaatgtaggagcttttcatctggataaggaatacagatgtcgttaagcaaattgactagttaaaacagtaactgtttgctttggggtaaaaatgcatgttcctattcttttaaacagacttttaaagaatgattgtttttgctacaaactttcctaccaaaacacttgttgagctaatgaacatttctaagtagaactttggtgttaagcagtggaggaatggcctttgcagatattgttaaacccccagtaccaactttgggtgccgtgctttcttcaagtttgtaattctgagtttatttttacttagggaatcttttcaagttgtccaaaatgtaaccataataaattcgatatcactgtctgtttagcatgcaactaatcatgatcaaggagaggtaacattggagacttaaagaaaatacatccataattaccattttagttttaacctgactgattagaattgttgggagggaccatggatgtatgaacaacatcatgtgaaaacaaatatatataagccagcattcccagtgtgctatacgcactttcactctcctgctaaagagtaagtaatcaaaatagcaataccaaccaggacccgtagttcccaaagcactctggatagatcatccattttaattcttagaacgactagtaagtttgccaaggcacatggtgtccgcgtgttgcaagtaggaagtctgtgaggtttaaaaggacagatgatgagcttgaggactcaaagttcttaaagcaggcatctgcctctcccgactcacacactgtgacaggcttggcagaaatagggacccagggtgaacctttaccatgccacagccatcctgcacggcacagaggaactaccaaaatgtgatgcagaggctttgctcttcagaggaaggaagctccctcaggccacaggggcacttgctacaatcccgtgcaagaaggggaaaaaaaagatatttagctgccttgtatgatgtgttttttccaacttaaaaagaaacctttgtaaatagggagtttacattcatcaaatactgtcagaatcctggtggtttcctgtgaaaagcatggttatatctaatggttgtattagtcctttcctatgaagaatgtagacttctgtatctaaaacggatctcaatcctaacttgaacaatccttcccacctattaggattatgccttttcctttaaaaattaggtgaacataatcactttggtttcctggagcatatgtttcaaaatgttgtcttgaaggactagtgctaatggattgctttgcgaagcagtgtgcacctggaaactgaggaaaagtcgtggactgtgaatgcataggccatggtcgtttgttgtcagtacagagtgcaaagccgtcactaaatcccgcagtccatttaacagggagagtttcagatcaaaaaacttggcacttagtcctagagtccggcaatgccagggcctcttacttcgatcacatccttcagttgtgcacaaacatccagtcatcattgcagcttgaaactccctaagccttttatcattactgccccagaacctctgtcaatgtggaatattcaggtgtcctccgcaccttggtcctacaacacttgcagtccaaattgcatttcttccacaataaataattctgagctatgaatttttcatatctatgtttttaatttcttttgcataaatggaacttgttctccccttattggtgatgagattaaaatcatggtctaaggccacatagcaagttttgaagccacagtcgaggctagcagataacctcacaatccaacatggtttttcttagccttgttgaacttcagttggcattggttctcatttggactttaaagtgacctaacaggcttaccaaatatagatactctggcatctaccactgagcatctaattgagcaagcctatagtaaggcccaaggatttgcagttccagcagtttctaaccaacactgatgttactgtctagggagcattctcgtaggggcactgaccaacagactgcatgcagtaactggatggcagagtttcagtaagacaaggggttttctgacagaagttagctgtacgtgtgctgccttgagctctttatttctgtttctgaactccattgggaaagaacgggacaaatatggagagaagaagaaaaaaatacttcaacattatgaaagagttcaggaagccgggtgtggtggcgcacgcctttaatcccagcactcgggaggcagaggcaggtgaatttctgagttcgaggccagcctggtctacaaagtgagttccaggacagccagggctacacagagaaaccctgtctcgaaaaacaacaacaacaaaaaaaaaagttcaggtcttctggccctcaaaaaattgacactaaagtgctggagagatggctcagaagttgctcttctgtaggactcaagtttgtatcccagagccaacaaggccaggtcagagtgtcccaccctccatgtgctatgtgatgcctcctgtggcctcttgtgagcacctgcacaaatatagcatacacagaggcacacacacatgcagaaaagtaaacaaaaaagaatcagacgcagatcctccagttgcctcctacctagaatgatggctgggaattaactagaaatgtgagtgctagccctcagccagtgccttactgggatcttcagtggaccccttcactacatgttttaagtgtgtggctttatgtggacctagaaaggagttctcacagcaaaaagaaaaggctcatcaatgatttgccagccaggcaacgtgactaataaaggctcttgtaacataagcctcgttcgaaccaacaaagtaatatatctgccaaaatgaattaaaacaaaacaaaacaaaaagagagctaaacatttttcagttatatcaagagataacatccagaccaaagtagctgatggtgcctatattagtttcctgggctttataagaaagtaccacaagcctgatactttaatgccatgcatatgcatctatagttctgaaagcaaaagtctaaatttgtctcactgcactaagtcagggtcctcctggagctcattcattttggagattctagaagacagtccaccttgttgccttttctatcttctgaatacctctgcactccttggcttatgaccaatctcttggatagctccaaccccaacttcttttgccaatcaactgactggtcctcctacctctttcttaggagaacttgtgattgtatttataacctacctaggaaatccaagataatctccccatctttacagtgttggtttaatcacatccacaagaccccattggctgtataaggtaacctacaagttctgggtatcaggatatgggtgtattgtggggctgttcatcactctgtctagcacagttcctttgcagtatgttcataagactaagttcagagctctctctctcattcattctctctctcattctctctctctctctctctctctctctctctctctctctctctctctctctctctctttctctctctcagcacagaatttaaccaaaaggacagagaacaggactgtgcaagtaaagacaatgaaagtatgagcagagcaaacatggagagggctggggagtgattcccagaatgggtgcttgtcatcagttgtttgactgtaagcttatcagaaaagtcacctctacaacttagctttcctctgctacagagaaagcttctcctgaaaacctttttcttaccactcaaatgcattttaaaaccaaagatttgcttactatctataatattcaggataaatattgtccactttctcttctaattcaagattaacttacgttttgaatttggaatatgttctctaaggacttctgaaaaaatactggtgaggctataaaataaataaacaatatgagtactttcacttggctaattcttaaatatcctactaaataatattatttacagcatcaaattactagtattagggtaatatgtgtactcattttatatactgacaacaaaaggccaagatgaaaacattgtactaagaactgtggaaatagttggtacttacagcttggatattgtctaccagtgtgagtggtagtcatgtgtggcaatatattaaatatgcctaacaaaatggtaagacttgttctcacagaggtcagtctcaaagcatgagtaagtaataagaaggctgtcactgatagatgaccagtgccaaagacaggaggacaggctgtttgtttgtttatggtatttaggcctggcttcagatgacatcatggaattaacctttggttctcaaaaggaagtaggatttgtttgctaccagtcttcctatagcgttagagtcaccccataagcactgacttttaagtcgtggttcacagagggccacaaagaattatttaaaggatatttataagaaggaagactaagagctgaactagaaaaggtgcttgaaagtaaatcagattctggcatatgctgagttatggcatttattattatgtgcagagtatgcatggaattttgaactaaaagctggagaagcaaaggtctagaaactctcatgcatagtaaacaaattagcccctttgttgttttccatatgccttacattggtgagttattcatctaggtacacaccaataaagtgtgatgtgccatcacttatgtgaagctacttgctcatacacacgactaacacacagtcctctgggagattctcacggtgtcctgtggacatgtccactctttcataaaccaaaagttctttgggaaaaggaaaggggtgtgtctacttttgattgtcaagcttctgcacttattaaactagatttcctgtaatgtttggagattttataaagcaactgccaataagtcaggatcaaatgaccgggttgctaactattctaaatgagaactatattagcatactctatgttcagtacttgttccttttgtctactctgaaaatatcagaaatttcattgacatatttatgcttaaattatgcctgataaggaaattattttatcataagcaggtcatcaactcttcaaatatatttttaatatatgaatatatgtatatatgaatatatatacatatatatacatgtatatatatatatatatatatatatatatatacacacacacacacacatacgtatgaatcctgtcgccaaggaaatagtttaataatctgtttatttgattgccagataaaaaattctggctttaactagttatctttgtttcataatgactttcatttttttccttgttcatttatttattacttgtctactatacactgcacatttagtgtggaaggggaagcaacagcctaagtgattatgcaaaccttaaatataactacatgtttgtgtgtgttcatatgctttttaaaagagcacgtctgtgacagggagtgacggatagcattgtcaggggaaaaattaaagagacacgatgtaattatccaagctggaattaagccaattaataacctgtgtgctaacactaccctcaaagtgctaaaaataccatcagttgcttaaatgccctgggtggccatagtcagcagtgttcaccccatccagtctcagtgctgtgccagggcatgtgccccctggcttctagtcaagggctgcgcctgagaggcaccaacatagtccaagctccaggccctctacagtgatggtgatgagacttacattattcctaatgacacttttagatacatttgattcactgctgttcatttaaccgactagttcaggggacctactgggtgccaggctagcactgttgctgagaacacaggcttaggatcatattgcctgtgtttaatcccagcgctgtttactgctctgtaacttagcaaattccatggcctcactgtacttgagtctcctctgctatgaagtggaggcactggagtacctgactcatagcattgctgtgcagtaattcataatagagtgctggatccaaagcaactgtcctagaatataccagctatcggctttgttgtgagccaggagatagttcttgaattgggaatactgagatttcctggccttcagatgacctaatacgttgcaagttgagattatagaaatggggttctaaacttcattgatctctattgccagccctttctaataaaagcctccatctttgaacttagctttcttgtctggtcttatgtcctgaactgtcagcctttgaatagaaaacacccagcacacccaccgttcctaatattgcttattgagcttttcttaataactgccaggtagttacagatctgtattcattgcttctattaatctctgccaaatagaactggtccaggaacatcacattttacagatgggaaaactgaggctcagaggaaagcctcagtttataacatttctcgtgagatgttataatgctctgttgctgtgcagtttgtggccctcgtatgtgttctgctggcaatcatttgtaaacacctcccttccctgctttgggctttccctgacatatattttgagatctgccagaggatcagccaatgtcaaaatcagttctttctatccatcacccataaactggctatggaccttgtatttctgactgatcacagcagctattattaaagaggccagtgtgcaaatgaactaagtcactttggctaggacatctttcggatgccttgctcttgagtgagttccaggtgcctgacatttctttcggttttcttctctcaccctaagtagagccgtcgttactgaagcatgactgacagttttgcttttatacacatcatgattcttgttttaggacaagaggcttaatctctccagtaacatctgatggcactggttttttataagcacctcctccttttaaaacatgcaccctcaattttctgttgtcaagaaagagctctatgcagagtgtgatcctgtgtccccaaaagatagaatcaaattcatgagcaaataatacaattgccccttttacttttggtggcttgttttcttttgaaatatatcagaaaagttgcccatagctaatcttccaggtagaaaatctcattagtaatttaaaactataataaactgaaagactcaacctctttcacccacactgtgcccgtattttagaaatgtgttgtatgaaaaagccacatctttttacctggtggcacacagcagatgattttcaccaaggaggttgtaaactctgggtgaggtctttgcagatcaatccactgatggtgttggcttgaaaatgtagcacaagctataccttgctcagacgggatccccataatgtaacatttctctgctctactctgaaaatgaacggagaacttcaatcccttatgcttatcattcaaactgaaccaaaggattatttcctcttggatatagatgtttggaggagggagattttgcactaattctttatatggaggaatcttcctactttggaggcaagagtgattttcatatctgttgggccagaatatttaaggagtcctagcattcggtgatatgcaagacggctttccaggcttctagagctctgggttctagtgttaacacactcgttgcctttttgtgatttattgctccgagttcctgggcctcggtttcctccctagctgaattaggggtgggagaggctcgtctctaggtcttttccagctttgtattctctgggtctgcaaatcgccttcagtgtctgccgtagtctgccttggcagctctgtttgtcacaaagattaatccatcttaactgtaccttggagtgcacccgggagaggaggatggatggattgttttgcacctattattgcatcagaacttttgcctttttagacaagattgtgccatgcctaaaatctgtctgcctgtctgcccactgactttgtctgtgctgatctcttgccatggtgcctcttttttgccagcatccatctccctccaagatctagattcggcatctgactgtacctgtcttgttctctgcagcatctgtctgctacacttctagaccatcgttaataaactttcacacatgacacacaaacccccaatatgccggcacctgcttacaaatatctacgttttctaaaactaggggagaaaactgcatttttttttaaaaaagacccctatctagtgccatttgtatctgcactttttgtttagttgtaagttttaatagttcccctttgagggtttgtcagtacgagcagtattgcttatcagaacacaccaacagtctttttgtaatattcgctttcccctctggttcagccgagcctgctgacagatcattcaaattcaattgttttatgtctaagccgaacagctaattaaagtagggatgattaacctgactggcagtgtcgctctccctcttgcgctctctctccctctccctttctctctctccctccctcctgttccaatcagtctttttctcacacactctctctcctctcggtgtgtctctgtctctcccctctctctctctctccctctctctctctctcctccctctctcttcctctctctcacagtctctctctccctccctcgtttgcgctctctctctctctctgtctcttgctctactgttttttttccctctctctctctctctcctaaacgtggtctgcttgctgatggcagaatggcactcggagatttgtgcattgtgtctggtttcctacgggcaggctgacccagtgcctccagggacttatcaatagaccactcagaagagacacagacaggagagaggaggaggggtggggggagagagagagaatcaatatcaagaatagaaggagctccgaagccattttttttttaaagaagtatcgggacttgggagagggtgacaaagaaggtttttcaaagaggcagtggaggaggttctaataaatttggaaggaaacagttccctgtcttgggaaaaggagaactcctgactgattagcattcacaccaggtatgagatgttctaccccttatcactgtgtcgcaaccgaggtggaaaggcttttttttaaggagactgagggagcatgtattttgctgtgtttgttgttggggggtaagaggggcggcgtgagaggctgtgggcatttgtgtatgggagcagggagaatggaagcagtacacgggggtgggagagagtgtggagtgtgttactgtcttccctgtctttgtgcacccctggggggtacccaagttcatttctagcaggtggatttagacaggagttacttaacgcttgaccgccagttttgaaaaaaaaaaaaagaaaaagaaaagaaagaaagaaaaagaaaaaaaaacgctgcttcctatgtctgctaaaaggaagctccaatttctcctctctctctctctctctctctctctctctctctctctctctctctctctctctctctctctccccttctccctctctgtctctccctctcccccatccgtcttcccctctctcttctttttttcctcttctaaccagacagcgggagggttcctggctcccagccagcccaaaagcctctaagtgttttgcacttgtttcagggagtagctgcccggggatttttcagcattttcactggagaacaaagagttctttacaaagggaagggggggcttaatgtctgatatatgtttttctatttttattagtttttttgcctaaaaaagaaagagtcaggaacagaacattactctataaaaacacaaagacattcaaaagaaagctagttatcttttctctccatcacccctacatatatacatgaaaaattaaaaggaatgactaattaagttggctgtgttgctcttttctcctcctctagtctttctaaattcaactgctcctctgcccgctttgctgttctttccctactcactgcaaaagttgctcagggtgcatcttcccttagcatgtctgttccatttttgtgtccctgaaatcttgtggaagaaagaatgagagtccatcaaataattgatttaggggcaagaacatcctctacttttgccacttttttgggtaaaaagttaattatggaattggagctcccaaaataccagtggggtacatcagctcatttgatctcccaagtttttgcatccatctgtgtaaagggcatctctgtgtcacttgtcagttataaaggagaggtagtaagggagtaggtgtttatattttgtttctatgatataaattaccaaactcccagagacattacttgtcccatctatgatatattagttcaagcaaaatgtagtctagacggaggttttctcaacaattctgattgccatgtagctttgtattctgtttgatgttttgcctatgcgtatgtatttccactatgaatttgtgtttgtagtaaacattctagaatgcttatcactttcaaattaatcctctaacaaaagaaaagagaaatcaggacgggaactgtatgagcaaagtatagtaaacagtttatcttttaatacatgctgtacattttatatttttatactaatatccttaacttataatcccagggaaatgctttctttctgaaagttctgctcttaatgtgtttatattttgagtgtcgtttggtaatcatttgaggtacataatggacactaaactgagcagaggggaaatagctacaagcgccaccacaaaaccctgaaaatgcagactaggctgagcacctaagtgtggctcagagggaaacaactacaacagttgtccacgagtcagaaactctctcctcctcttcctcccatttatggaaaaataaaactcattcattatccctggggccggacactataagaaaaactagaggtacatatattttcccatgtgtatgaactgtacgtctatctgtgtttctaaagggcacagtgcttatggggcagagggcaacgcctcactagtcagccctcctggctgggagggctgaatgccttgtgtttgaagtaacttgataacaaggggtcttttcgggaacccgtctatgtgtgtgctccttcagtaatgaccctcaaattaagcctggcactgggtggccaagctagtacttgacctcatgggaagatactagaagtaagggaagtctgggcaaatccaaaatttctagggccggtcacttgtcacagttgcatgttttcttgcgggaaattcttgaattccactcaaaagtctatatttttgtagaatttgtaaacgatcctaaaatgaaagtcactcaccaaaaataaaagaaactaagtctttaaaaagttttagcttaaaggcaagaggcttggggatttttttctgcccttgctccccaccccagcccccacacatactttgcttggtttctttttcttttcttctctttttttcccctctcctgaatccttttgttactgcagctgttgtacctgcatatttggtttgtgtgtgtgagtgtcctctcctcacccttcatctctctccctgtctgctgtttggggtggccagaggattttctgagagggacagagggaggactggaagaggaagaggctgttgctgaatgcagcagtacccccccccccaagtcaggcagccccgtcagctagctgtgctgggagagtacagtgagaggtgatagctgtcattctgggattcttcgtaggtctgacctgagagtaacacactcaacagtcgaggagaaaggggaacatagaggaggaagaaagaaacgctctttgagctggaatacactggccctttcttcctggaggcaatccgctctggttcttggcgacgtgtcctgcactatcagatatcatatgactttttatttagatttctttttggagaatggcctgttaggactctgtttgttttcttttatttaatttccttctcccttcacccgctagttttgtgtatctgtgtgtcagagtgtgtgcacgcatgcatatgtgtgtgcagtttttatctttgtttttgttctgttgatcggatgctttatttaaggacaaagctttaattatttcagtatagtggtttaatcatttgccaaaaagaaacctcattccaggcttttgggggcttggggtccatttttaaacacatccattaacccaggaggctgcagctcctgatgcctgctggtcagaccttggcccactcccccaccctcacttacccctcctcctcagcagcgtgcacagcagcgtgaggtaggaaacacctgtgcggagttgtgagggaaataaaagtagaggcaacttcttcaaatctgggctcctgctttcactttaataaacttttttttccgatctttgattttttttttcttttctttttggcaccctctgttgagcttgaaaacatcagagatagttaaggatatgtccgtggcgcttttgtgaggccagctgagcaccactggaaagtggagcaggagttgcaatctattcagagacttaagattaagtaagagatttaaataaggtctttgagatctgtgcgctgctcggtcagggtttggtgataggtggtagatggggtatttagggtattcaaggcagggagagagaaaatcccaaactggagaaagacgagcagttttgctgcaattagtacttttaaaaccttaactcaatcgaatttttattttatgtatctcaaaatttagctgaccaatatgtgatcagctatctttccatgcttgctgtgcaattatactgacaattcttgctgaatttaccctataatttcatgtatttttttagttttggagagttcagattttagttagaaaaaaaaaaagcataacttctctcgatatgcctaaagtggtctatacattattcttgccatactgaacatactagattctgattgtatgtgtatgtttttgtgttacaacacacaagactgccttaaagactcaggtgaccgctacatccttcagacctgtagattttagcttcttgttacttgttctgaaattatttttcatggacctttaatgtgcaatgtcttttttttttataaccaattgtgagttttgttgaaacttgaagagaaatttattccacccctttaagagtacccaaaagggaagggagaactattctctttcagctcaaaaaaaaaattttttttagaaacctttttcccccaacggaaaactccaaaacagctctgtctcagaacgttaaacttggcatgggtaagaaatgtgagttttgctttgtttgaggaaatttgttttcgagacaacaatgttataaatatttttaaattgcctgctgagcatgcgctgtctctgactttattcatagttttaaatacacaccaatgcaatcttctgaatggccacaggtaaggctgtcggtttgtgggattcttctctgaggcaccttcagtgagtctcctcagttttccagaagggaaaggggcaggagctgagctcagacctggatacccttctaactatcctagagaaaaagtgaattgccctctaaggcttgcacactgtacttaaggtaagtactattcaacttttctttcctgtatgagttgcctgccttaactttctggcttattactagcagagtaaatggggaaattttttaactcaaggaggaatttgcctgaaacagaagatttgcagatttaagggcatctattgtgcataaatttagggatccgcgaatttgccagtaaaatgctagcagctcagtgcttacagagcaaagatgtgctagtctgaacatgtctgagctcatctggaatcgaaagctaaatctaggtgggcctgttataatacccgaaaaggaacacatgtgtcttttgtacaggctttttttttttttttttttttttaaagccagccttccaaaggcaagtgacaaaagaattggactggcctcttgctcagttggtcctgtactttcctcctgcagatacacacccaggtgctcttgctggttcagtgtgttgtcatagctgctgaggaacagtctctccagtcagtagtggaaacacttcccacttccagaaagctttatctccactctcgatgtgatgttgtctcatgtaggcatcttctgaggtctgcactgttgttcgtaagcttcacagttctcattgctcctgctcgagtgcagttcgtcattagctctctgttatagtcatggtagagatttggttttcattttgggaggcctttttaactattcaaacaagttaccctcgaggatgaaatttctcatacttgtgactcggaagtgaacttgtcttgaaaagatttgtaaaacaaatctaattagctgtttggattttgttgttgttttgttttgttttgtttttgtattttaagttcatgaattttaaacattataataaatgtgactgatcggtttttaacagaatatattttgctatgcagtgattttctaattctgtcttctttgtgtgctttaagatcaaatttgaaaattcagcgtgttaaaaaagaaatattaagaagcctataggtagcctattgatatttgcaatacccactttgaagtaattcagagttttaactttctttcaacctactacctttcattgccaatcggtataactttatgcaggtgtgtgtgtgtgtgtgtgtctgtgtgtgtctgtatatagttatagataaacatattaatgcatacttacatatacaataaaagatacacaaagacacttaatatttatgttaattatatttttatataaaagaaaaagaatccgcgaacttttatcatttttctgtaattttaaaatcctataaactgttagttctgattattatatgtttataaacatgtatttatatccttataagttaccttaatttatatttcataggttttacacactcctccattttatgcagatatattaatgttgaagtttattcaaataccacttgctgtgttccgtatctgttagtgtgttaacaagtggtttggttttttgtttgtttttttctttaattttgatttattcttctctaagctagacagagtatatgtttctctatgtcactgatattctgagaaagaaacttgtaaaactgtgatctcctggaaagctttcaagtgaacaggacatctatatgctctttagcttgcttctcctggatccatttgtccatgctgtgccatcagcaaccctgagaaaaacggcgctagtaaggatggcacaatgagttttctgatcatagacctaggaaggaccaaagaaaattgtggcatatggaggaacatgccaagaccttctccaataaaatcagctgctttatgctggtgggttggattttttgttgttgttggtttttgggaggttttttttttttttttttttggtttttttttttttttatttcctttgaatttttgtttgtgacttttttggcttgctggagcatttccctataatcttaggaagccacagcaaattttcaatgccacagcaacactgtgcagccaaggaggggcccagagagctgatcctgggggctggagcctttcagcaatcatacaaggtagggggtaaggaagctatccttttctctgaattttcctggtttattcagtctgccagggacagggattttcttcgcgtatctttccttcacttacttgaggctctcccttcaatgccaatggctttctattgcttctgagagatggttcacatggcagagcacccgcttctgttctatattgaaacatggaaagctttgaaaactgggaaggacaaaggaaaggggtcttagggcatctgggaaatatcaaaaagagcattaggctcacagctagtttttgccggtcatgtctgtaacttctctgttctctacagggcttctcagtgttagagtactgaaggggataactctagggtgccagcgaggatctaactgattcagtagatggagctcttcgccctaagtctggatttaaattaaagtcccactgcagttgctgggactctctgtattaaggtgtgtcatgatacacacataaaaccaaagcttgtgtagctgcaggaagagatttcctggcactttttaaaggcatgaagcatgtgttccgaaacacaaaactgcaggggagcagtaaagatagatagggtaggaagtgaagtttacctatctaaacttctccctgtgggtttgaatactcctaagtgtgaagtaaaacccagttaccatacaagggactggtactttatagactggtactccaaacctagaaaaacagataatgtgtacaggtttggctgtgtttgtgacaagcctttcaagctgtttgaactgtacggctctccttttatttgactccgaaaaggaatcttaatgctgaaatgcagttgtttcatctagttagtctagagaatctgacgaattgtgacagtactgtggacagcacagcagatttgtaaggtgcctttataggagcagaaatacccaacagtgaccgaaaatggatctctagtgtctgctgtaatatagaaaaaaacccacttatttatcaatttttaaattaatcaaaatgagtaattgccatagcattcttgtcactttgtattatcttcagtaccaatactaagtttgatcattgtccctccttggtgccaggaaggaaggtagatgtatgcaagatggaataaattatcttccttgatctaatgtcttctcacagattagaggtgttattgagaatctcttgttaaatcttgataagatcatttggccaaaacagaactggcaatggccttactaccaaaataaaaagcatttttaaggccttggatttcctttgcacaccacgtgtctgagtttgatacagtccaggaaaatagagaggatgagagaaaattattcctaagcagccgccgtaggccaaacactgaaacagtgccagcccggaccaatcaggggggcttcttaggagatgtgtgctttgctgagctcttctgtgaagagaagagggaggaagcccttgaaactgcattaggatgaatgagtcttcactaatttcagcaaagtccatggcagtgaatttgataacttcttccttctgtagacatctgaggttcccaggccagcagagactcccttgtcatcgcactgacacatcttttgaacaaaagtatctttctgagtttaaacaagtgaaaaacttctcatagagagcaaagagtaaaattaatggaaactcaaaatcaattccaaccccatttctggcatgatgagagtaacatttgtgctgtgtttaaagcagtttaacacaagaaaatgataaagtgatcaatatacttaaagccaaaattaaccaggagagaacaatctgcaatccgttcccagcccgaaactctacactttagattaaacacgaaataaatgagtatatattttacagagtggtactataagccttataacataaacagcaatgctgagatgccagctagccagtgtattatttaagctatgttttcagagcttgggataaacatttctggagctaaagaattgtgcatttatttatccgcatgcacatactatgaccataaaaagaacaaaagttaaaaggtatgtgcattgtcagtagagtacattgccactctacagccttcatactataaaagaaaacaacaacaacaacaaaaaccaggctctaagtaaagcaaaagagtgttttaggctacgtcagcaagtcaatgaatggtcagtgtggatcagatttaattttttttaaatacttaaatgctttttaattcattaaagtcaataaatatataggtgcatattgtacatattttatatctattattttaataaattaatctgaaggactaagttaacaataaattctgaacctgtggattcaagatcaatgaaatgccactatctggatttataaaattcttgctagtcttcagattttgttcccaattagcaatcttttattactgtatcagagtcatttggctgacaggttatttattgatcatgtaaaatgacacatgtagttgaaacttagctgacgaaataaagacaactacgtgcaaacacgtttactatgttgactaaggtgcagtaggaatgatgatgattctaacaagcaccatgacgaatgtaactacagtgaagcatgggtgattacatccatcagactgaactccatgagcaaggtcaagagggagacgggagctgggacgaagtggggactaatcattacttattgcagacgtttgaagcttggggccgggtacagaattaatagatatggaaaagaagagtcaatcaatttcaaagatgggtaaagaggcagtatttttcctatagggtgtaatcaaggacataattcagctcttccagggaattacagtaacatcgtaagcgttggttgaccagtgtgataatggttgtaaagagctgttgtgcacatctgcttaaacagtgcaactgctagaacaggttgttgtgctttaaatatccacaaagcaaatgtcagcatcatagactcagaatcattgtatctcaaagaatggagaaacccaaggtatctcagtgaaagaatgttggaaagatgtaagaccatgtaaatttaatacctatgtgtatgtgcatgtgtatgtacacatatgtgtgtgtggtttgtatttggaaaacagaattgcaaccggaaatcttaagacagaggaagtggagctgcattgatttatctggaccggggctgctataccctggttcctgggaagcataggttctaaagagggaagagctgcaggttccacggagaagctaacagagtgattgtatctggaattaaaccattaactattccaatcagaaaacttacacagggcacaatggaagattgttctcagaatgagaaaggtaaaagtgagatgtgaagggaagttccctgaccactgtgccctcctgccccagatgaacctgcagagctagacagggccagtactccaggtgtaagtgaagaggagagcaaaggcacatagccttcggcttcctgacttgggaccaataacctccccataaatgtggcaggggcagaggtaccctctgtcttctggaagatattaaaaagtaccaggcatatcctaggggctcactgaagtttacactactcccctgatcccaccaaaaacaagaaaagaagaaggcggggaggaaagaactttgtagtcacaactttcttttcaaaagaagtcaatcttcctccctaggattctgctgtgcacctcatgcatttgcctcccagactctctaaccaggcagtgctgacgcaccgagctgatgcccagtacaggctgggctctccttatctcctcagcattccccacctcttctcatctctttctccaaagagtcgcagacaggaactcctccttccttaatgtctatggtactttgtatattttagtgactcttgacatattctatttcatagactagttgctggtttttgtgtaaagtaaaaaacgattctgtataatttggggtaatgtatatacttttattgggcctcattttccatctttgtaaacaggaagatagtggcagcttgcttgggtagtataacgagcctaggaaatgtcatctataatgtgtctagcacacagttaccactcaatatcagtttcattactactgtaactaatactctcccacttctagggttttccctactaatataatccttaaagccataaattagtttgttatctcattgatcagtgtacactatgatttttacataataggatctggataaaagtgtatagactctccttctacaagcctatattccatctgttcttccctccctaccctaaattttctcaggagctttagccagtggtggtcatggccagtaccagctccaagtacaccgtaaaaggtgtcagtgttatctctgtggactttcagcgccatgttatgtttcgggttccccatagaccttcagccactagcagtggctctttgtagcatctccacagtgtctgcttgtattcctggttatgtgattaatgagcttgttatagctctgtctgtggcttgaactagaaacttgcacgttggagagcaggtcaagatctcaaatttcattttgcttgcatctgttataagccaattgtgtattcattacatttatagattccctcttcagccatatattttcatggccgttgagaacacctgactctatactgaatgttcctagattttactttggagacctgaaaatatagcaatgaggcttggtgatggctagctatcatctttgacattttcttctcttaatcgtgtaatctcagctaaatttgaagaggagacaagaaaggaagttttaattgtccagagtatggcattgtaattcttgattaatgagatttatggtcattatagtttttgtacacattgctgtttttccaaagatgtaatcacatattgtgcaaggggaaaaactactaaaactatggaaatgattttttaattgaagcatataaagacagagatagaactaacattaaatgcaagggttcagctgtaggcagggtagcacacaagggaaagtgggtgcgtttggatgttgatccttccaagtgttggtgagaaaatgaagtagacaatgtggtcatgcaaaggatagactggcatcgtggcattctcaagccaggaagaaagctgcctttaaatctgccagcattccacttatgtgactggtattagtgaggaaaacaaggccacattttggagagctggtaattcaatgaaggattccaactttgccggagtaatagtgttggcatcaaaagaaaaaagttttgcagacttttgtgtgtgtactgctgttactggtgttcctggtgggtggctgaatcatcctgatggcattcaacaggaaccagctgctgagaatatgaaaatgcatgcatttagtcctctagagagacaggagcatctgcaaagtcctccctcccgtcctgatagtgcacataatcccaaggagcgctctctagtagttttaactctattcatttatccatcttctcttcctccctttcatgggaaccccgagtccagataatacagttatctggagtatttgagtcccaaatctacaccaggttgccgagtcaaacagtgaacacttggccaagaactcaggctttgccttgaattccaagctcaaggggagaaagtggcactcccctctctgggactgcctggcttaggcagtcacactcaggttcctgcctgcacagagacaccaactcctcccgtcccataccctggccagaattttgaattctggacaggcttttgaattttcctgtctacgtataaaacctgtggatcctctgctgttcttgtgcgttgattgtattcttttcttttgtaattattggtggattttagcttaagttttggttttggttttgattttggttttggttttaggctagcatccacacctgaggaaaatgcaagtgcaaagagatctgcactccagaacccgcccagtcttcccatctctaatatttatgaataatgtattgaactgatagaaaaaaatgttgaatatgttcattatgaattatattcatcagtgtgttgcctggaatataaaagagcaaagcagttgcagtgttactacttccttacaatatatgcactggtacaacagagctctgtgtccgttcctagtccactgtgtgccatccccaaaagtgcacgctgcatatctgtgcagtaactgaagaggaggacctgatgggatgacagacagcagaggttcaacggcattcagagtaggctcaggctcctacacggaagcagccatggagagggattgatggtgcagtggcctttgaaaggagtcacgttcacacagcagacattactcaaatgtgtcaggtgcagagaatgtcaccggtcctaccatcaaaaaagagattcacaatcttgatcctgatattttttccagattaatacaaataactaatttgttgccatttgaaagtaaacaagaatgaaagaaaattcataattaaatatttataaggaatagcttcaaaaattcattttatgctttttctttatggttttccttcattatttcattatgtttaggatttgttgggtttggggtttttggattttgagggtttttttttaaaactgtatttcctaggcactcactagatgtcatgagtacacactaaccagaaacatgacaacaggagagaaatttgggtgttttttagttagacaaataatcaacagaagaggcatcagagttaatataattttaaaatagtctatttctaccctcatgagagtagaggcaagatagatcatgcaaggtcagggactaattgggcacagcccagttgaggacatttccgagttaaaacagtttggtggaaaggtaggacacaagctctggcctttcttgggctctcaggagaacagagggtattgatgagcacagactgcctcagagaagcctctgcctcctcttttctcaactcagatcccagatgctcagagtccaatgcatcgttagaacctatatcaacgttacagagatcacacagcaaacaacatatcccagcgttatttacacttacacattttagagatgttctttctctcctatgatctcttcaaaggctaaaattcataatacctcattaaaaaacatgcatacacttcaaaacaaacacaataacaagtaataataagataaataaataaataaaataataataataataaaatagtttataaaagcacaaagagagagaaagaaagagggatgggaaaagcatgcttgcagaaaatttatcctgtccaacacttacatccagtcaggagaaacaatagcagtatgacaaaggagacagtgtgatctcctgcgcttcctgaccatgtcaaacaaatagaaagccatctatcccctctgcttcacagcaggactgctaaagctggtggtacacacatatagaaatgtacatattacagctttctgtttatagcagaggagaatccttttaaaataaacaactcagggttttgagtatatttgttatgaaggtcagatacttttttatataaattctaagaccttcactgctaattaccaatagttaaaatacttgaaaatgatgagtgagccgctaacacctcaacaaaacaggtttttaaaagtagggggtcagtatagagatccaaacatatctcttaactgaagaatcataatgtccttaatgaacatactacaaactcatttaggcaaaataaaagataagctttgccaacagatagctttgaaaatgctaaaccctggatatggccgttgatttgacaccaaagtataaatggctataggagaaggctagttgtgatatgttataccgcaggcatggtatgacttatgccttcctgacctctcagcagctgtgattacccacaaaagacctgcacaaggctaggactgttaactttacatcatggaggggaggagaaattcataatgctgcccttctccccagggattgatggacaggtgacagttctatgcaccccatccctagacagtcatgagttgttgggaactaggcattttcttcagtgagatagccactttaaagttgccttgtgcttctgtaagtaaacccgattaggcatatccacgtaccagggattgagtgagatatgtgctttggtttgtcattggtgccctatctgaggtgaatagacatttgatcatctcccccaggaaaagttcagataacatgttttagaaaatgagacaaaggcagatatacaaagaacaagggtagtcatcagtgcctaccaacatctgtccaagccatgggactgtctcaacaacaatcaggctcagtgtatagaaggcccctaagatggctgagaacgaggccatggtcatcatactctgtactgcaattattcttttgattgttgtggctctttaatgtctctttttcccattcagccctggctgtaatggtaatgacgtgaggagggcaggtgaagataaataaatgtgatctttcatatgactgctaccctctaatggcatgtcctccagcctcttccaagcatctgggaaagagaaactgacttccatggagaatgaagtcatagctccagcttagcctaagcagaggagagtggaggaggactaagcataccgttagtgaaacaagtgagtttctgctgggctggaaccaaggtctcctatttcctctatttttccaaactgaaaagaggtactgtggggactcacctgtacttctgaacccgtatgcacatgcctaagacctgatctaggtaaggccaggcagaaagaaatcaggacatgcttgcatccaagaaacccagctcctttgtaataacttctgcctgttttggtttgtgttttgacaagcgtgcttcagttcccagtcattgatgccctgcacatcctcagatcatgacaaagtagggatcagtgggtacaacaaaaacagcagagcccagtgcattctgggccatatcagacactccaactgggtcatcaccctaagaaagcaaagtcaacctcgagctgtgagagccgagggtatggctccaggtttgaatcttggtgacaatgggacaagaaggctcggctacagaatggtaacaagccagggctggctccatgagtgcccagcatgtgttcctgcacaaagccctagcttggaagggccccatgctcaatgtaaagcttcactgtggctatctcgagattcttaatcatttctaataaaaggccacacagttctgtacttagccctaataactacaaattatgtagtaggtcctgcctgcctggaatttaccgtcctctggcatgccaactgaaggcatcagtctcatgtcttctgttagtgaaaatgatcctcttttgattcctcagacgctcattcccctgttaaactctttgaagattcctctccaagttaggtggctcaaagaacccatctcccttcctccctccaaatacctcaagatgatcatgatcaaggtgatctttcgtattttataatcaaaaactctgtagctgtcttagccaccttgtttgttttgtttgttttgagatttgatgtgtttggctgattgttttactaaaggctaacaccgggagaaatagttatatcatgtagtaaagtgtttgctgtgcactgctatcgaaataggcattggccgtcagactggagaacggcatctagcattttgattgtcttacctgcggtgtttcttagctgtcatgtaatcaaatacatcagtctaatgaaaacaagttgatcttctagtcctgaccttggtcttcagccctccacctccatgccactgctggttgtatgtcctctgccacccttgtcatcctgtctctcaccagttattaaccccttgtggttctcactaaaacaacagtggtcttattaaagtgggtctctccatggcctactgagaataacttttgctgagtgtgagacagctacagtaatccctgcctgtcccttggtaagtgtgagttacataaccacacggtctggagccttttctcagtaacagccttctcagaatattctggcctcctaacttccagtcaagtatcctttccaatcccctggggagggaaaggcaggttgtccacattcctgaaacataaagttcacatgcctggctcctaaccagtctccaaacagccatagcggagaggagaagaaagtacttttatcaaacctggggaagagatcattatgtgacaaaagaaacctcctaagcaggtctgtctcagaaatgcactggagagtggagctggcctcgcacagcttggttcactgactgtggaagctgggcagaactgcttctccttcctgcctctcccccttccacaacacctcttcacacagtgccctcctccctctaaagggaaagagaacagggggaatctaagagagatagatgctaagctgggtaggtttttttctaattcaaattgaaaggaaatcaggtttacctgcccttccctgaagcttgcaagctttcccaggatttctggcctcctggctaagaacaacataaccaagtcaaccctggagcccaaaggctgagtgaggctttccagggctcaccagacacaagcaagcccaccacccaaaccacagagttctgggcttgaccacccctgtcatcctctcctttgccagcagagcccacggccctgtgttaatctgattacctccttcaactttccttatccccaaattgtctctattcccctcctcctcctcctcctcctccaccaccaccaccaccaccaccaccaccaccaccaccaccatcccccgatctggcccagtttaaattcaaaacttccttccactgctgtaattgttggggttgaagtggtcaaagcatcaagacatgatgagtggcttaaccacaggatgagatgtttgcatttcaaaagtgctgcaaattaaaatgtacttcactaacagggggcatctcgggcatcttgcctacagtgggtggttattccttctgagccaaaccaggctgctgagaattagccatcgtcctcaatgggagcagatgtgctcacctcggccatgtcactgtagacacagactggaagcaaactcagaaaaacaagctgatcaaaggaggaaatgtagttttatgtggtaaataatcagccccagcatggttgctgagggtctcctatgaaaaataagtcacaatactactttttggttttacatgaaaataagttcctactttaaagtcaattccctatgaggttaggctacaagaagagtgcaaataagtttaaaacctgaatacttggtcaagactttggcctccagagaatggtgagcatttcacaaattagaaaaatcacttgcttcagggatcttatttacattcttcttcaaggtcatcaaacttagcagtaaaactgagtttggatcccctgggcttcttaaactatctagattttctccacagttacagacactgctaagagaggccaccctttctttctagtctttttttccctctgtttgttgttcctacaattccagagaaaatgttaacaggagaattaaagaaagactgtgtggcattagaggaacattagcaactattgaaaaagacatttgacctatttctgtagttatcaatgtgatagtaagtgttgccaggcaatgcaccattgacagctgggagcttgggctgcaccagcagcctgttctcaggggccttccagttacagaaggtggtaattctagttaataaaagggtgaacttcaaacacgttttaaccaaatcaaattgtagcaggaaatatcatattactgatgtgcaggccgactcacagctggtaacattagtcactatataggcccaaattctgacttttcagcattttcagatgcatttctggctgccagagagttccccaggcacattgttatggaggaataggagatttttaactaacgtagaagctagaataaataataaaaaaaaatttttttctcattagactttttattagattgtcagatattcaaatatataaccaagccaaacttcaggtggtcgaaaggagagatttagagccaggaggttttttttttttttttaattttttttttgttttgttttttttttccatgacatgttggcaaatgataaaagcgattcactctgctaagcagagatgctgggcagaattcccccaacactgattccatgccatgaaatgcacatggagcctggcctggcaaggcacagtgtgcagctcagcctttgtgtcctgtggctcgcatttgaatcctagcttagcccctctgggttctgtgaccaaggaaagtcacctaagccgtgacccttaggattgccatatagaaaatggcactgtacccaccatccattggtttggagggccaaataaggtgacaggtggaaatgcgcgtgagaagatggtgccagacaggtgctgaagcagtcaaaggtgttgatggttatcttcctccattttgctttttaaactgttattttaaaaattaaattcccccaaaaaacccaaaaccctatattttactatgataaaaatactgctgcccaccctgaagactgctcaggtcagtccaatgtgtaaatagctgtagtcacctcatcgtaaccacagtgaggcctgcacccctcagtggtctgtactgggttcgtgcagtcagaacatagagggaattctaatcatgaccgctaggtcccacactgcatgtaggcatctaattccctggagcctcatgtttgtcccttgtcctggtccatggaattaggagacctgtcagacacctttctgcagattgtctactgcggcctggattttttatttctaaacttttcctctgtacctgtgtctccattttcacagagattaattctgatttggttcgcctacacttttgatgctttaaaagctttccattgtgggcagattgtctcaaataccgtatttgagggtggaaaagaaaattctgcccaaatgtaagcaccacagaatcaaagaaacagtagtgttttttttttttttcaattgcattctttgaggatgtagacaaccttgaattctttacaaagcacatcagtaatgccatcctcccttctcttacacatgcacacagaggggtggggggggggcattcttcaagatgtaaggagacaaaatgttcaaaaggaataaaagtcgaaagatagggttattctcttaaaaaacaaaactagaagtcagaacatgtgaattctgtttctgtctccccttcttggttgtatctcagcctgtccccctctataaccccactgacattacctccagggaacatggaatctcctggctcattctcttgggggaaaattcatttgttactgttttgaaagacattttgatacctgtaccaagggcactttacgtgggcaaagcctttgcctcatttgaaaagatgaagacctgaattatgcctcccatcactcttcagtgggtaaaagggtgaacttttcacactagcacaggaagaaaacgatgtcatttgaatgccaacttctaatatggttttaataatcatataaatgtctatacttggtgcagaaacactggccttggctggccttcaagtgactttcactttacatgcctgtctttggtaaacattagccagagagggtcttggggggcagtgtgtctctcctgtagcccaccatgtacactgatggctacttagtggaaagcctgatgtggtgccttcctttgttgtgcattgacccatttagtgtgtctgcatgagggctttgcataaccagggggcttacttctgaacagttaaagtgctgatttacacgtcacactcgacactgcttgttccctgttctgtcccagtggacattggaacctgctgtgtgcctcgtaaacagagttgtagttccctagaaggtagcagcagaagtacaaggtgagggctggagagagtattacttaagagcacgtgatactcttgcagagaggaccccaagttcagattccagcacctgtgtcaggcagttcataactatctgtaactccaactctaggtgatcaaaacctctgcaggcacacgcgcgcgtgcacacgcacgcacacacacacacacacacacacacacacacattactttttaaagaaataaaagatatattgtgaatgttgcaatttaaataaatgaaattaataatgacatgtgaattttgggcaacaaattgtctcttctgaactccacaaatgaagctatctcacagagatcattgttcaattatatctgtaaagtgtaaagaatttttaatttccatttcatttccaatttatagcttatagatgtcatttcttttcagcaccacatgcattgtttctggcttaccttgggttagctatgttgctgaaattagtctgaaatacctagactcatgtaattttcctgcctcagcctgctcagtaactggagcattcttctccattcttgatatttccacatttctaggtttttaagtgaatgggtgtttatttattaattaacataataaattacagagttttttctttattaatatagtcatgttgtttcagttacctctttacttcagactttgtctatcccataacacaaagattctagggttttcatttgagcttaaaaaaatcatcttgaattataatttggcctcctcctctggattcacacaagacagatagaaaattactttttctttgtgagatgagggggttttctctttcatgggactcttatatagttgaatgacatagctctctggataaaaaccttttaattcctagaaaaaaataacacatcagactcataaatccagattgaggaagctttggcatccccacacaaataattttatacatcctacagttcaaatttacaggtgaaggttttctcctctgagcttttaggataggtgcagacaagccgtaatgccagccattaactgtgacctcagtccaaacgaagcagatgatttaaacgcaaacgcttcactgttcctctccagcctgtctgcatttcatttgcacaaagtgatctgaagctagtaccctgatattgggtcacaggaagcaatacagcgaagcatttccaaacagacacatcactctaccctgtgttaggttcttcctccagaagcctgtctagcagcaagctagcaaagccagtctctcctcagctagcattctgttgagtcatgtttactgtcccccctcaaaaaggttccaaaagcaaatgcaagaggttgccgaatgcagggacatgtggcgtgcgcaatactgaagtgagaggcatagcatgcacctgccttgtggctgtggcgggccatcttgactgcgccatgccacaagttagcattttggatgagcaattgccattctgttgttttcttctcaacacatggtgttcaaaaacagttaaaagaaaactgtacccatttgctcatcccagaaatctaaaatttcaaaggcgcatgccaaactaattttcacataatattttccaagctttttctttgcactgagaaatgatacttcactttttgaactcctggtatcctggcctggggtaagtgggtgcagtttctctttaaatggcattaaacatatcaaagcaggattatatctgtcactgtctttttttttcctttttctaatggaatcaaaatccttcagggagtgtcccaaatccacattaatgtctttgagtgctaatgtctccgctgggaccttcacgttagcaaaataacaagtgtgtggttcccctgtgctgtctgagttagaaagagctgaaccacgcatccctgattctccatggccttcagctagaagatgagtccagggtccgggtgttgctgactcctttttggccacttctctcccttgtgcagcttgcccacaaagcttctgtgagagctgtttctaccatgggcgaagctacggagtgccagccatgaatcgaatcaaaagggccaagcttcgtatctaccagtcttgctttatctctgttctgaatgtggaaaaattgtgaagatacccagagtcataggacatggctatgcatagttttgtcgcggctgtgagggtatcaactatgtgtcactttgatgctaaagaagtatcatgctcacccattcccctccctctttttgtctccttagcaaagcaattgagatgattccttttttatttattttttattttttaatttttgtcaacttctaattatcaagtgttggtgccccatcatgatgccatagataataattataaagagtagattctaatgtattaataaataataaatagttactatttaatcttaaaaccgaccttttatatgcatttaatgatgttctggaaatttgaggtatttctttgttattgttgtggttttggctttggctttttgatgcaaggatactactctacaaatccctgacttgccttgaacttacaatgtagcccaggatggcattgacttcacagcagtcctcctgcctcaaccttccacatgactcattcacaggcatatacctccacactcagccatggcactccttagatatttgttttgtttgtgtagagaacagggcaacatcaggttttgagccccagggtatcatggtcaaggctgctaggaagtgtttggttttcccatcttctcaagttctagagcattctgagaactatcctcctttcttttctttccaccctttttatcctgtccatttttttcttctatgtcctttcgggtttttttttcctccctttcctacaaggaagaagagaagatgaagagtttgaaactggccgtgtttatatgtgtggaggtgctcatgggagagttcagtctctgactggccagcctaccactaggcagggataaaaggttatctcagatggcttctctctgaaggccttcacgtgtggaagaaaactcttgacagttttttcttctctacactttgcaaaagtagatgaagtggaaatgtcaggatagtgcaggcgatgtgttcacctttacatatttttgataacctatttactggaactgaatgcagaattaagtgggacagatttttgtgtggttggcacagattttctggtacaagttttagagagttatttacttggttttttttgtttgtttggttttgggtttgggtttgggttttttttgttttttgttttttttgcttgtttttaagcattgattccataataactttgcagtatcagataaattatctaatggaattggaaaaattgccttttaaacatgagtcacttaagttttcttcaccactactcagttgggtaggtctaatgttagtgtgttcatgctagcaggtttaaatggtaagatggctaaaagtaagtctctatgcttacactaacttctgcactaacttcacattgtggactagatgctcacgtagaagatcaccagtggtatttatattgttttcatctttgcgcttcctctttcatagagtttgccagagaatataagctgtacagatcaaatggtgatccaaatgtgagtgccataaattaccctttagatttgagtgtctaattaaagtgaagcttcactctgccatggttcctttgcctgaaggaagggaagtgaacattgctgctctgaaggtctttagacattgaggaaggcggcttgtatacagcctacggcacctgagctttggtgggcactcctaggctgttctgtcctctcttcccctgggggaatccttggggtgggggtgctcttgcctttgatctcacggttgccactagtcatttttctcattaactagattgagctaatgatactcattagtttttagccactgaacttttgtttatcacaaggaagccattgttctctgccttatattacagtatagctggaagcaaactggcttggagactgcctgcagaccagttcctgcttcgtccccagttctcaccttgacctacattcccagggctgaagagcagcaaagcagcaagtcccagaggcctctgttctgcagctcctgagggagggcagtggatctgggataggttcttaggtacatccaaatactcagagcagctgacaacagcagcttatcctgagcttccagggacttccctgatcattcccagtgtcagagtcaaatacaagcacagtttatacctcctctcatgagtcaaaagtaatggtcatgaccaatattaatccagtagtaattaattgtctatagctatttgaggtatagagcagatagaaaaccagtatattgtaaaacctgattagatcgaataaaatatgtctagctatgtgtttttgctttcataatacttgcacaagttgtgactcaacacatgtttattgaatgtacaaatgtattcaatcagcagctcctggccatgataatgtcaattaaaacttagtttccagccgggcgtggtggcgcatgtctttaatcccagcactcgggaggcagaggcaggcggatttctgagttggaggccagcctggtctacaaagtgagttccaggacagccagggctacacagagaaaccctgtctcgaaaaaaaaaaaaaaaaaaaaaaaaaaaaaaaaaaaaaaaccttagtttccactgtttactgccccagaatataccttacacatctatatatttatcccatacttcttcctctctacatatctgtgtgtgtgtctgtgtgtgtgtctgtgtgtgtgtgtgtgtgtgtgtgtgtgtgtgtgtgtatactgttcaaataagaggccttggaagatgcaagatattgtttaaaaatgaggtcataagagactcagttgaacctgataacttcaaatctgtctttaaactcattgttgctgagatcaacagctgtgtagtcacctctctgaccattagtagatcctcagtttcctcattacagaatatctaaatgatcaccacttccaactccagaattccatccattctccctagtgagaaatggtgtgtacttctgaaaagtgtgctattgtggaacatggtgcaagtttgtcctcaatgtaagagtcacaaatggacttcattgagaggctgggcacttctactgcttttatggtgtgtgtgtgcacgtgtgtatgtgtgtgtgtgtgtgtgtgcgcgcgtgcgtgctcgctcgcatgtttatgcaagtgggtacagatgagagtgtgtgtgtgtgtgtgagtggatatgtgcagtgtatacatttatatatttgggtgcatgcaagagtacataggatactatcagttatcttctttgatttctctccaccttcttttttttagaaagagactctcactaatcctagaactgacccattagactaggctggcttgccagtgagctccagggatccccaggtcactagcgtttcagctctgggtcccagatgtgctgctgcacacagcttttacatgagtactggtgatctgaaccgaccttactgactgagtcataaccccagatgtaggtacttacttgactgtgtttgtggagggctgcatgtgcatgtacagtgtatgcacatgtatatccaggggcactcacttgtgcttgttgaggtcaaaggtgatcatcatgtgtcttccattgcgcttcaccttcttttatagatttgtctatttatttatttatttatttatttatttggcgggcgggggggggggaggggaagaggccacctgggccaatgtgtaggagtgaggagcagaagacaacttctgagagttggctctttccttctgccatgtgggtctcaagtcaaactcaggttatcagacttggaaagagataccatctctctgaaccatccccctggccaactccacctcctttttgagacaagttcccttgaaattttggttttcgtagctagccagcaagcccttagaatcctccgtgtcagcccccagctctcgagctgaggttataggtgcgtgctgcaaaaagagacggagccctagccaatctcctttctccgcgtcccactggagtagacggagccctagccaatctcctttctccgagtcccactggagtagtgctgcttttgtggagctgaggttgcagcccctgtgtagcttgtggattccaaagggatgctagatgctggtggccatgggttttagtcacctccccgtgtccagagtcacttcttcctggtggaagtgacttgccttttcccttttgatgactgcatatttaatgctgaggctgatagagcctgactgtctccatcatgaaaaggtttttatgtcattaatatgctgatttggttcatgaaatagagagtaaactgccagtgtggttcggtgctggggtggctcctttttctcttccttttacaaggaaaaaaaaaagactctaaattgtgctttacgaattatctttctccccttttatatttgactttgaaaatctatcttaaaggaacaactctgaaagtttccattccaacatctgcctttggatgtaaccctttgagtgtatatattccccatgctagatgactttatggctttggacacctcttccttttagttgtcatgagcatgctgtgccctggacttccctcagggtcactttggcatctaaaggacagtgactgccctagatggtgccttttggtatccaaatgagtcctctgcctctgttgccttccctctctcccagccgctcctccccctccattcctgaagaagagtcttaaaatttatgtctttatgataaaattcaataaacatccaaccactagattatgatgagtgctaaggggaagactcagaaaacacatacccagtctcattttggaggccacttttcaacataaacggacagcccttgggggaagccagcctcccacatgtgagtggaaaagaaacagaggtgttgcctcctctgcgtcaggacctcctcctccctgggctacagtgcagtcctgctcttgcttaattaatccattaaggtctatcttgaccctactcggtaatgatcgaggggctcaccggagccatctagaaggggggaattagatggataatgatttctgtgcagatgatgtgttctgtctttttatatagttggtcccatgagggacatatttcttcggtgtatccctgatgatgttctcaagacagatatattacagaggaataaatcaggctattagacattgctagtgtctaattcttcatgtgtaaagtctgtgttttaaatatcaaggctttgtaagatgtatttttattaatgtaatggtaagtaaggtagtaagctaagtttgagaaatttcatttcagtattatttttcctgcactcaggtgctcttatggaatatttatgttccccgccttgtcctgattgctccctcctacatcagtcagtaaactgtttaagagggttcctcctcaatccaactcaacaagtgtttactgatacctgaagtgggcataacagttgacaattctaaaaaatcaggaggcttaaatgctttctacagcttaaagtattaaaacaggacaagttgttgtttgttttaaacagttagttgaaatcaaggctaaagttgaggtcagcagttcaatgatattgagggccaactgtatgttttcttaccttccttagctaacttatacgcaactggaatatctatttaaaatgcactgtatcctttgtaaatgctgtgaggagaggcagctggagtagttcttaccttgatttagagagctggcagtaatcacagaaatctcgcgcacaaggctctgccgtttgacttgtaatgtgaatgaagggaggatgttcttcagtgcctagggattattccagagatgtggcctcgtgtgagaaaagtttagaggtggagagagaagactctcagaggggacaaggcaacggcagcaatgacttacttactggattaaggtgggcccaggtggcaccagttgatgacaggttagaagagcaaacaagtctcataggagatttgagtacagggcgtctagaattcacaactgagatgacatagcctaacaatccactggaagacagaagacagagtgtcagtaatcagacatggagagcatgtttagggtaaggggcacttttcgtatcctagatagagtgtgatcagagccagtcaaggagagcagtgaaagggtatacattagttaaggtcaatctagggaattttctagattttatacccaggtatatagaagataatatctttttttaaaaaatgtgaatctttagcaaaagattgggccattggatgtgacatggactatagttatgcataatgtaactagcagaataatttaaacatgaaaatggcatgatccttgttatgtagaatttgaggtgctaacagaacagaacagccattctgaaaaaggaggttttaaccaagttaaaacttatctacttagttcagtagcctaggctatgagaaagtggatatcttgaatgtataaacaaagaagaaaaacctatggtcctgaaatggtgccgtgagtaacagcctgttcaggagatgccaaaggggagatcggggaatcttggaaaggtttgagccaagaatttaaacttcagaagccaaggacagggaaagaagccactttaagttttttcagaaggaaaagtgaagaagagaaagaaaggagaaggaaggagggaagaaaagaaggaagggagggaggaagggaggaaggaaagaaggaaggacagagagtgtaataagggccttacaggatcaactcatctaccacctgaactataaatgggagaaaaggaagcctacaaaggaggtggtggcttggtccaagaaagtagagcaactttcagagaaaccaaggtgtaagctatgagtcttgatcatagctcagtgctccttctactgtgccgtcctgcctcagtcaagaactccagaaactgcccctgcacatcacaagtaaagcaaaggactaatctgagaggaaagagccagcacaatctagtagagctgtttctgcccccatctggtctcctaaatgagccattcactatgcttatagctgtggttacttgtctctctgggcatcttttcctctcctgaacccattgctgagagacagggaggaatgttaaactccctgccactgtgggcaggataactagcagcgtagtaaagggtttcaagtaagtcagaggttcctttctcacttgctactgtctggagcttgtgtgcaagagaacacacacaaacacagccatgtagttttgcaactgttttcaacataatatcagaaaaaacacaagggtgcttgttgaataaaaataatttaaagtgagcttaggcttggtggatttaaaaggagaaagaatgaaactgaaaactccctcactgtaatcaaaactgagaagctggtttgctttggaccttgactgcctttcttcagcaccacaatgcgaggatttggctaatctgtggtctagaaaatgggccatgctttgcttgctaactatcattaaattggtccctttgcttcaggaagacctcctaggtttgcctggtaagaaccataaacttgagcccatactaagtataactgcaagatcttgcagggatgggagagatgctgtgcacttgtgacatgttgaaggggctcccctgcataatgtgatccctgtctttaggaatagagccttgctcccatgttaatacattctggaaattgctcaagaggcagctttggcattagaatagcaactttcaaagcagtgagcgtcagcacttctatttctccttcttcttggcgtgcattacgtggagttggaaggactaattggctaaatgaagggactcagtgtggcagagttgaaatcctggcatgtaaatggagaggtggggagagacttagcatgcatatctacatggcctccctttgtgaattatcataatagaaatggttctgccccttctgtagtttccctgcgagatgagttggggtgtgaagtgcatggcacaggaattcagcatgctttgtatctgtgattacttgtctctgtgggcatcgtttccactcctaaattgcatgtttacctaaggttgctgaataatacattgttttaaaagatgtgtccctgaattaaggtttttatatgacaattagaatatagctgcatacagctgacagctgtttttaaaaatcagtaaatatcacttgcaaaagcaaacagaggaatctcatacctatttcatagatgttcagtttgcttccttgacctctaccaagcacttaggaagcatgatcaataaagagaccaggcagttaatagggcaccgactccctgtgacagcagtcaacgtagcatgtggggtatagaaatcctagaatcatccaccagcttttcaagagcagctcctccattcattcttcaagcttttgtgtaaaaccacagtctagaactcagttggctcatcgacacggacatctaccagctcttgactaaaattatcacaggcaaatggggaccaactgtattttcacaaaatctgcagtggggcatcacagtgttttgtatggtttgacttccgaagttcgatctgagctgcatgtaaggagagtaaggtagacagcccatcatctcactgatgatcgctacctaattacctcttaacatgtgaggcaaggcaggaaagttctttggctttgctctctaccagtcttttttttttttttttaatgagttgggcactttgaataccaaggttggtatcaaataggaagtggatttaagttatacattctttttagtttggccttaaaaataagccaaaacaaaacaaaaacctaatatcttactgtgtagctccagaactcactttgtagaccaggctggccttaaactcaaaggcccccgagtactcagattaaaggtgtcacgcttcatcattttatttatttatttatttatttatttttatttttatttttttggttttttgagacagggtttctctgtatagccctggctgtcctggaactcactttgtagaccaggctgacctcgaactcagaaatccgcctgcctctgcctcccaagtgctgggattaaaggcgtgcgccaccacgcccggctcatcattttaattttaaaccattttatacttagtgatatttgtgaaaaccaaagctcactgcagtaatggtccacagtgtaagtaccttctagactggttctttttccatacactgttgatcactgaaggaataatttgtagtcattaggtactagagtatgaaatgttggggttaaactgttttatggaagtgtggtgctaaaaaacagacttaggggttcatttataagctaacagaacattagctactttgatcaaatttgagggtactggatttgatttaaagattcaatattaaaatgctgccctttgccttaaaacatggtgggaatagatttgcctagaaaataacattggtacggttaagccacaacagccaaataatagaaaatgacctttctagattggagtctatccaagggggtgacacacactcccagttctgccattggttaaaggtcaaggagattgacccaacataagtactaccaattcttttcagtggcttgtgccataattttatcaccttctcagtaagtaaatagggatgtccagagatcattctccccaaaggagaaatgaggaattctgaggctgtgagggcctgagtaccttccttgcttagagctatctacataatcagtgcaagaaccagaagcagagatggttggtgaccagggctaggaagaacaagttatattcattcacattaattctaatgtggtttagactctagaaaaaaaatgttacacaaatatgtggttgtttcatgttctctatagatttccagaaagggaacagcaattgagagcataatgttttgctcttgcagtcttatcagctaagtcaccagaaaattcatatttcacttcaaattcatatacagtaagtaatatcaactagaaattgttcataaagagaaacctcttgctttcttgttgtgtgttcctcacatgtcagactaaaatggcttttctaagctcttacagattactgcataaggtctactataagccacaggtttatagatctttgatactcaggaggtaaaaagcagctattcaaaggagcatctgttttttgttgttgttgttgttttgggttttggggggtttttgtcttgagtatagctttcagatgagctttgtacccactgcaagaaacctccaaaccccagcactcagacaagtaggaaagtcttgtcatgttttgagcagaagtttgagaggtctaagtaagatctataccttctagagcctgttatcatggccagtgggaagagagcagattccaagagctgagattccccaaaattttgtcagcttgaacattcactcaggatagtaaggggctcagttcatgccttactgtacagtgggcctcagccactccaaaaatgtacgctaagattgggccaaaacaaagaaggctaaaagcaggctatgtcagcaagatggtgggctttagaagacagaagtattttccctgagacaatattctaccagactcaacgagattttaacacacacacacacacacacacacacacacacacacacatgttttaaagtgacttttacgtcttatttttttcttctccaagaaattagcattcagagagttgcgttccgactgtggcccgatgtgtgccttgatcaggagtgcatttttatgactgggttataaacggtcataatagtgaggggttgggatggaatgccttcaaaagataacctagacctactgcaggcttgaaactctattagcctagctattaaaaccaggaggacaaactgtttcttccctggatacaaaagctgttaggctacagcttgacccagtacaaacttttctgaatctctctccactttacaaaccgtcagctcattgctgccgtctgcagtgaggctgtttacagctctgtgctaagtggaaagttcaaatcaattattgtccattagagtttaggtataactgatgaaatatccccagaggagtattgtaaatgtatcaagacgtccttccccattatagaaatggggacgcatagtgaattacttaccttctctcttgcccttaatgcctctgaaaggctgctgggcagacagagctcctcttgtgttgctggggttttgagtgaggacttcaccatttggtgagcatgtgtcttgagctggcaaatgtctagactccaacttactgtctactcttggtaaactttcgtgtggatataagaaaataaaaaatgaaaatgaaaaattgagagactgtaaaaattgattggaaagtaagtaccgggcaatcaggttccctttgcatgattgccgtctcactgacaatcaagtgagagacgctttgacgcagggagagttggtgctgggccactgtgcttgtgagaagcttgttcctccttgttctggttctttcattcagtcttctaccggacagaaagggagagtcattcatagctaagcatcttcaggctctaacagtgatatttcaccccatgaaagccagaacccccacacccacaccccaagaaaaagccagaacccagtagaaaacaaagatctatttgcaatctgctctaatgggacttgctttggaagatgttttttgcttattgtctttcttgttgatgccctgagccatctccttgccccagagatcccacggctgcaatgtacagactcttctcatacaaaagtctaggtgttcttctctagagggctgtgactttttttaaacaccagagaagtaatagaggaaggtcaaagagacatcattctcctggtcaggcattctctcctgaccccatggacacaggtggagggacacctttttattctgagttagtcctatttggctccaatgggctgcctgtgtgaatgtagcagcacacagttccaccctgactacagttagaatgaagagaagattcctatttaaaatgcagcactgatttccctgcgttgaacaccaaggagaactccaaaatgtccccctgctcgcaggcttatcagttatcttaacagtgtttaccctcagctctcatgggacttccattcatctcactgtagagccaccaataactgaacaggaaatctgactgagaagaagagagagcacttagaacccttattgggtcatagtatcttaggctgtgctataccattttcttagtctgttgttttcttctcttttggattttttacatttattcattcactgtatatgagtgtgtacttacacgtgcatgtgtgtatgcgtgtgggtgaatgttagccatggtatgcatgtggaagtcagaggaaaacttgtagggtgttggttctctcctattgtgtaggttctggggtcaaactctggttgtcatgatcggcagtggacacctttaccgactgagtcatcttgctggccctggtttctttgcagtgacccaggaatccttagtctctgctttggatatgccgaaccattgcttttttaccaaatcacagactgggaaggtggtctcttgctcagcgggtatgtgcctgggtagatgctctcccctgagatgtgcagccactcacacatcaccagcttctaataattcctgacatttaaagagtcagtccatttcgaccatttctttctgcatatttgtggaaagagccaatggtttgcagcattcaggaggcacaggatgtgcaccttgtcgtgtggatcgtattcgttctgcccggtttatcggttgtttgttttctcttaggattttgggagacttctttaacatgttaaatatggggctaaaaatagtgactagactgtaaatcatttgggggaaaatattaataagatacaaagagaactgccttcccatccaccctgtgtcataatgacaaaatgctaaatgactctgcatgtctgactccctcgtcactggaggtgaggcctctggattctgtgccatacaaacccccaaatgtgagagccttaagtgcaggctgaagtaccaagcgtgggtttggatttccctttcctgccccagtactctgaaagcatgtttactcagccttccctccgagcagggtccctgtgctgaagccggtctgccagcccacttctgagtaacagccaacacccccatccagcgccgccgaccgatgggcttgctcgaatttaaggagcaggactgattttcaagtttcttcgagccattatttgtgttccaagttatcttcctgcatccgtattaattttctgtttccaaaagtaagccccatgtatttcaaggcagcacagttgctttttcacattttccagggaactggtgtttttaatgtcatgtgaggacaacattacacaatgggtctttggcagggacacacagaaatgaataccgtgtgcgaacaaacattaaatggcagtcttaattacagagttagactctgttgtttttaatgcccttcaattttataatttgatggaaaatgcatcaacacagctattttctttctaccctaaatgattaaggattgatatacccccaaactgcagtagctccttagatcagctaatcaggtaggccttacatgttatccactagagggcagtagggatacacagccactccaaccaatatgtgcaacatatggtcgacgtggaaacatagtagccatagctttcatgtgtatgaaaaattcccattgcagtgttgcttcacttataattatattgaaagtaaacactaattcacagacagactacgcatatttcaacatatccctctagtgttttgtctattctagtttaaaatgccctgagtaatgaaacttctactacttcccttgggaagctatatcaaaacccacttgttttacatgcctgtttttttttacaaacacacactcaagatctattagtcttccttcaagttcatttagacctctgttgcatactccattttcccttacagcaaagctagttccattccgcaaaagatgtttcctgagtatccattgtgtggaagacatacttagttgagggatgtccacagctggcgagcattgcaaggctgcggctgaaggatttgcatgactccaagctacagaagaagctcgtccaaaccaaacatcagaagaagatgttggcctaagttctaaaaggagtgacattcataaaactgtcataacaggaaaaagtttagttgaacttggattttctgtattgaaatccagagtgctagtattgcatggtgacatctaacatcacctgaaaaactgtaagctctctggctgacctggcggtgagctcatgccaaggagacgacctgggttctcaccagtgaaagctgatcctttggccgatagatcagattagcctagaagtttagaaccaattttggggttctttatacctacttatgaaacagaggatatggtttgtaaatcccaccaacaatgttccgtagtctgcttttcgttttttttaatcatcgactcactgggttcagtcccagtgccgctacacacattgcatgatgggaaagtaacccaagatcacatgcagtactttgagtttgcaccactggtcttttacatatacttcgatcatatgtatctgaaggagagggtaggaaaaaaatccaagccaagaaaatccctttaaggctagaactcacagttacactgttactacaaggtttccccatttacattagagacagagcaaagttatttgctctgttgggtctttttctcagatacatttccataaggctgtcctgatggccaaggacatcccaagtagacatgtccacgggtgagagtgttctgcctccaagtgcagaatgaaatgttgcagaagttctaggaatgatacatacctctcagtgctctttcacatcctttgagccaatgtagaacatagcctattctccagggtctttaaaggcctttcttttgccaattaggagggtaagaatgtgctggataggctgactctctgtaggaaaagagaagggaaggatacagaatcttcatgggaatctatacaacaatagtccagacttcctatcacaaacaaagcttacatccaaaatttgtgtcacctgtaatgaaatccacaggagtattttatatggaagtaattaagtgcaaatgtacaacagccatttttgtgtttttgtttgtttcaaaataccagaggtgattaggccatattatgaactaattgcttacttaatttatttaagttgaaatgagttcttgagttatacaggacccaaaacacgaactcattactccattctgcacaccactgaaaagaacaaaacaaagacgttagcgcctttatttcattatgttacaacacaccaacattctgagcactgatgaggacccaagtggacagaacatctgtatttggtaagaaaataaaataaataaatgtttgctccatcatttagttcttccattgatgtgctgaaattcaaaatgaatggccaaaggtaataaagtggcatgcctttttttgtacactttcctatggaaagtttaaacgactcttcaaacatatttgaaaacagtaaataaataacctacaaaattcaatattttcttaaatttggaagtaaaccacagtcattcctaggcttgagtctctgtacaccaagtttcaaaccaaagcatattttggtattttgatggttgacttataaccccctgaaaagaggacctgattgtgtgcagtgaggacagctgcccctggaactccgtccaggctactaaaataaaacactggtgcttaccagtcactgctgaccaggagatgcgagaggcagtactctgttctataggcagtgagggagctctgtcagcagtgcatgcttgccgtggccagattctagacaaggaaaaaaagagaaaacagtacaccccaaagccaaaccaaagccccaggtgttaaaagcaattgaagatgccaaaaatcttccaggttctagtcctgttcagtatttttaaggtactgctaaggaattctagttaaggtctgtctgaccatgttagcgaggtagctggtggtgttgagcatctctataggtttatacgttcctttgctcatgattatctgaagcaaaatccatggagcttttattgacgctttaaccactgggcgccccacacattagcaaagtatatgccaatgttttacaaagacatagtggatcaagctatagtacttgttgacttaattgtttcccacctctcaaaagagttggggtgactgcgatagaggtaaatttctgttttcccatgtgaagaatgaagaaaatgaatctgtcattttcataccccagctagatgctgtgagcatttgatggactggtaatataatcttaataaactcagggagtttgctggtgattaattatgtctttttgaaagaggatgctaggaggagcactctctcctgatgtgaaaaataccaaatggtcattgtcttgtcttgtggcatagctgcttttagcaataccacaacctcaacatgagtgagagtcatgtcttgaattattttgctcatgggctcagacaccttaatactgatacccagtgttcttttttggcagctattcattttaatttaaattaaaacctgtgactatgaaatgaatttttttttctgtatcccaagacatttactcactgaataaatatttattgagaaggtactcagtagaaaatattatactgagccatatgatttgcttaggaactaaatctgtggtggtaaccacattaaatccatcttgtaaccaagtaaaccatccagacaactttcacaaaactggaactgactatttgaaaggagcccttcactgcacagttgagggcatttggaactggccagtaccatgaattccttgcactctgcacatgtggttcatatagagctctagaggcagagcccaaagctcctggtcatagtgtgtgctgggttccagccctcagcatgcctgtttatcacgttctcagggatgctgcagggatgcagtcagctctgatgttttccctgcactatctttcttctttgatgctgatcagttaagcagtggcatggcttttctgagtttagtaatgacacgtccccagaccatttctgcagtcctgtcatcacattggtgtcgaaggaatgtaagcccttatatggacacgttcttaacaaataaaagcatttctcaaagatagattctcttttcttaatgatatcaaagtctattaactttctcatccattggccactggtagacactctctgagaggtgtgcttctgagggaatatttatgtgaattttaagttgctccacagagttctgagaacctactgcatgtgtggataaatcctgaaggaaaaggaaggaagagcaggaatatacatgaggaagaggccctggaaaagggtttgaaagactttgttataaactggacctttactactaattacttgtaagcatatataataatatataataattctgaatatttccaggtgatggtggtacacgcccttaatcctaacacactggcagaggcaggttgatctctgagttcaaggctagcctggtttccagagcaagttccaggatagcctggggctacacaaagaaaccctgtctcaataaaaacaaaaaaaaaataaatcagtactaataataattctgaatattggaaaataaactgtttttcatgaatgaaaattaagatacagatgattctgtaacatagtgtttaaaagctcactaaatgtcccgacagcattgtgccattgctttaggttagcaacttctttgcaagacagccagactgcactaaaatagaagaaaggcaaactcatttggatggacccagttactcttgtagagtaaattctgaactttcctcctctgccttctccccatcccagtatttgtcatttttcatccttcaatttgaaaacccatccaccattacaaacacacacaaaactatgcagtgtgatatttgttcacttcttagatattccttctattcaactatgtgagtttaggaaaactatgaacgtttaggaggtagagagaacaacttaccattgatatgcataggctgctaaacttggttgtgataccctagttgtgtgtggtagtagctgtatgccctttctcttgtggtcatttgcttgctcctcttgttccttcttaatgagctctagagctatcattgctgtaagatgtacacatgatttgctaaccgaaagctactgtgtgctgtttaggtaaagggaaaatgaagaaaaggacctggtagctctgaaagatcaaacgagtaccagttgttggtacttcaaccaagatggctgggccccgagagcatttctgggaagcacagcagcatatgtgttcatccatgtatgtgcacagttcgaatctcagctctgccacttaggagccatgtgacctgcgctttgcttctcctctctaaaggtctctgctccatacctctcccacctgagtgagggaggtgttactgcagagagagtagtggggtgcgcctcaggtaggagggtgtagaccactgcaggtttgcagacattctggccctcctgtgccgccttttagcatcataattgcctcagaggatcttgggagtctgtggttttaagaaaactccactgggtcaggctcatagtcctttcaggtcagcattcagtttctgaccacaggaccagggagtgttacataagtcacaactgtccttgtcgctgactgcaggagttatttacttcccttcccataccctagtttctctgaataactctggacttgctacccatgaatttagctaaacttagtgatatatttctgcggtcagtcttcaatgaactttgtttgcaaccttgtgtgtaaagtggttctttgcttaaagaccaggaagatattcatcatcacataacagaacgtgataagaaatccattttccattccccggctttccatccccttacagacagtatccgatccctgtctggatttgaccatctaaatagaaagcttcattggttagaatcattgtgatttaactcttcccttcccctgtcaaaatcctccagactccaagcgggatggtcttagtatgaatgcagttgcctctgagccagagttcagcttagagacagctggcaaactgttcaacaaactggaccagagaggagaatcatagcaaaaacatgatctgtctggagcaaagtgaaaaacttgccttaaggaaaaacaagaggcatttcccctgctgtaggagaaactaaataagggttacagagcactttcccagtgccttgtgcctctccagcaatactttaggcttagaaccatagtgaggttaaactgaatacactgtgttgctgtcagagactgatgttccagagtgacaaggcagcaccagtccagagtgacaaggcagcaccagtctagggttaaagagcctcgtcaccttagcatcctcactccacacaaagatttgagcttgaagtgactcatggtgagtggatgacaacctactgtggaggtgctctgtgacccccaaggtcactttctaaggagaaagtcctttcaggtggtaactgatgcagtcaggcagctctgagcccgatacccctgtcttctcagggcctctgacacaccagcccaggcatggcaccactgtctttagaatcaaacatcctatttgtccaaagcttcatagaacctgtggacaaggtatccattcatttttttctctttgtgagctgttcccttctcatggatgaggggaactaaattacaggcacaagtgtggctgaacacaatggagagggtactgaggtaagcgccatggtatgtcccagcctgatgtccttgcctgtgtgtccaccataaaaatcacaaggtcatttccagggtcctgaagtagaagactgagatcatcctaagactaggcttttttcacatgcaaatgacacagacttccttaacctgctcacttggagaaatcttaggaaaccaacaccagccttgtgtccggacaaacagaccattaaagaagcctttaacggggccagtttttgctgatttgttttagcttcctttccaaatagtcttcacactgcttaattcaaaagtgcttcatattattttaataagctctaccctgtatctctctgggcccttctcttcctccctgaatgatcctgctaagttctgaaaagcctttgccaggcagataataggtgaagatcattgtatttcggctccctgatccattacactcctgcctttcacccgcatgcagagtgcagcgttgttttttttttttttttttccctaacagaataaattaaatatgaaaggaaaagactaatgtaattcaaataaacatgttaatgaccctatttttccatttggtaactagaccggatgtggtggtatgccagttttttactgagcctgtaatttaaaactttgaacaaggacactttttcccccttttatttccatcctccattcccaacctcttttattcttacagactctccttactgtccaattagtttgggaacatgaaaactgtcctcattgctgcctggagtcttaggcgacctgggtggtttatctctgtggggtggcttgtgagtttgcagttggaccggtgattaacctgtcagagcgccgtacctcttccagggcatgaggaagaagggcactggcacaccacgcacctcctcctcatggcctggcaggcgattttgcagattgtacatgtgtgtgcttgtgctctaggcggtacttcaacgctgagatgtggggacagatgaccccttaacctgggaactagccatgcattccaactgcattttagtcagttagctccatgtcttaagaactttttattgctccaactaaaaccttagctaattccatgtaccctcaaataacctctagtctccactcccccgcggcctctcctgtctcccttgtacccagagcaaccactttccacaacactctcatccaacacacacacacacagaggaaggagaactaactgcaaaacctctcctgtcccttgtgcctctgatgcaccacctgtctgctgtagtttactctagtgagctcagaatcctgaatttctccacactgggtgtgtgtaatctattcctcctccgcccctggagtgcagtgtccccttggcatttgcaagctagaagccgttatctcttgtttcttttactttagtcacttcccagtgtttgaagggaaactttttgatgtgaacatattctggtttgggttttttttttccctaactgacgctggcgggcgggaggaatgaaggggagagagggctctggccccgttacttcctgtttgtttttgttccggagaatgcagaccatctgtgtctctccaacgcttttcttctgcagccactgttctcattcggatagttaatgttcttagttttcctcatttctcactaaacaatttcctatttctcttccagaaactcctaagcccctcattaaatctttcttcctgaaatttcttatcttaatagcacctctggatacagttcggtccccattaaggccaggatacaaattaagtaaatgataatgggagagaggagaagggagagagggagagaggaagctgtaaatgagaggggaaaattaggcatgctttgaaaatggagtccgaggattctcagacccaggtcctgagtcctagcacacactgccaactagaccctctctgtcgggtggactggggcgtttctccatattgtggatgtctgtggaaactgggccttctaagcatggctggagagtgttgctcccaggcttgcttccggggcatcagataatggctaagattaccctttcttatggctagcaagtgtactttctcatagttatcagaatttgtagagatacatttttcttggagatgcccataagcatcctgtatacttcgggatggtttgtcttgtttttcagtgtagtttcactacacgagatctctaagctacttgagcctccatatcttttgctgagtaccatcttcatgtcagatgccagtgcgttttagagcatcggagtttccccactcatgtttaaaaacaaaagtcaaccctccccaccccttagttcttaaggccaggattaaaaaattaaatcaattccaaggtccagcctcccagaattacgtcagtcagtttgagcctaatgtgtgttcccaacagtccacgggaaagcaaggagtagctgtggccttcccagactgccagacaagcattggtcactggtgtccttctgtttgtccctgctgtagtgccttcagccaggcacataccatttaatcagtgatgtattaaaatgggcctggtgtagtcagaaatagctaggcaaaaatcgactggctatttttacaaagaaaaaaagaggagagaaaattggtcttttaatctgggcaaatcaaatcgtgcctgcttgccttccacctgtagctctatgtgggcttgccaagaggtctgcttgaaggcagtgctttcgtatacttctttatttatgctgatccacatggggtcgtaacaccaaggtatcttcaaaactgagttttcccattcacatgagaaaatgtgtattctatttctctcaggggagactacaagaaaaacagacctcctctttgccactcttagaagatttgaataaaaacataatacactcggcctcttctgccgtttagtttttttctctgtcaagaaatcatatctgagtatgacatcacagcatgctgctccaggctgctgggtgatggatgaaggcgagggccttaattgggttaacagggcacaccaggggcgcagggtggagggtgagttctgctctcccagttagagctgctccaggcagtgtgaaagaaacacagtcatgccagggaggagctcctctccccagggactaggaacaccggtgctctgtcttcctttcatatatcaccaaccaacgaaattaatcttttgaaaaggaaaaatgtaaactgtgctttgtttttaatctgcaagagagttgggggtgggttgtgctggcaggtttgttctgtagcattgatttgtgaccaacaaaggaaatgtctacttatgagacacaaatcaatgccaccagactgtgaaagtgcaaacagagatgtgagagaattactcaatcgttagtcctctgtggaatttaaaacagtccttcagttgttccgaaacccacctatacccaccaccatcctcagagagagagagaaagagagagagagcgagaaggaggatgacctcttatgattttatgaagggaagacaagattcccttcatggatttcagagcccactcgccgtgtcctcagagacactggtggatcagtttcagcccaggctcctgctttggtcggcagtagctttggctactctaaagttggcagcttcttgcaaactctgcttattttaaagtaatccacagaacttagtattttttattaacaaaagttaaacatacaaagatgtaggcaaaaggctaaaaagatattttgtgaaatcaccaatttgaacacactgggaaagggacaactgacctgatttagtggaaagtatgaatcctgtcatatctatgtagtttgaaattttgagagtgttaacaagtgaatctcttgagcactgacttcaaaataaagattacaactagcaaacctgatagctgttggctagatgaggctcccatcctccccacatgaactaacattactaatttgcttaaaatcctatttccagagatagcaaaaggtaaatttcaatactatccctattctacctatcacagtttataagttatgctaatgagccttcagggaactagaagaaaagatggtcagatgacacaccagtgaatatttcttataatttcttcttagtctctttaggtttgtcagataggccagggtcctatgcaaagcctcagaaaacattggaagcccagaaattctttctaccatggctcctccatcctttcctgcttctgcttccctgatgaagtcaatccctcctgactctctcacctgacccaacaaaagcacgcttacttctccttggccttatgttagtcagctgcctggggaaaacaagggactgaattgaaggatcagatacctaccaaataaagtaattaatgatgagtttctggccaagcccactgaaaatagcccctcaataaaagcacacaattattaaactgtgttacattctaattcctcacaatccaattctgacagtgtacacctctgacttacacctgtaaatcagaataaacaaggaccttcaagtgtccaaatggactccaccaagtctccaacaaatcctgcattcaaaagtagtattatctctataggcctcatgtatctgatttttccattccaaagctggttagagaatacacttagcatagaacattgggaggagatggttctgggaaactgagagcaatggcgtgtggctttggcagtggagagtccacgacacacagttccgtctgtggcagagaggttgaactgtggagaagagggtgattctccaaagaaataggaaaaatctatctctgacaagcaggaatgatgagcgttcacaaggataacccttcatcataaaaaatctgagattgtaccagtgtagtccaacaggagcaggaacctctgaagggcctccgtattctaacatttagtgtgtgtatcagtgctcatcatttctgtcacttatacttcggtggagcattttatacatacaccacttttatttatttagctttttttttgtcaatttggaaaatgcacacatggttttgtacggttctgaaaaacaagccagccaaagttactcagcgtggacaccctgagagagaggctgtttactcctgagtggtttgttctaggtccaggtctctgacaggaggcctctctcccttccattgatctgaggtagatagtgtgtgttgtcgtctggaggaaggcagagggaggcatgtttgctcatatccagctgctttgctttgttaatgcgtcaatgtaactgaccagaaacatggtacggggagttgtttgtgtttgttctttgcttatgcaactttccaagcagacagtgttcttgagaccagatggtaaagaacagtcaactgcaagctctactctgcagatgtattgatgtttcatgtcttcttgaagcagttcaaatacatttttgaatttttgaatagtaacccttgtatttctacgaggtcctgtttaactaacaaggaaaggggctggaatatttactttcatggtctctgggggcagctgagcagtggaacagcaatgttataaccatatggcattcaaccttcaaccagacaaacgtccagcacgtgttattttgtacagggtggacatcaggtcacagtgaacaccttgtgttggtcacaaacacaaacctatttccaacatcgttgtttccaacagtgtactttcttagtacattttttcatttattttttattttatttatccatcatttcaacttggcacatgtttgttggggttgttttgttgtagttgttgttgtttatctgctcagcaatttggaagtttacttggaacacagatgagttaagatcaaaagctgtttttcaaaaaataaaatgcctctagtaagtaaaaatgaagatgctatatctgaatgaatgtggaaagttgtccctctgtatatttttaaagcttctcaaactatccccagttctcagccaaatgcagcctacccagattgtctttaggaaagtagcaattcacagggatttgcagttagctgcatatcaaagcacacactctcttcagtccctgctcatagctccaccattttagaatatggtgagagatgccagagacctaccatctgtttaatgggctaattatgtttagcacatgcctacttcacagtaataccatgagtgaggttgccaaacatcatacaaatgtatatgtttgtatatattgatatataaatacacacataaataaagtcgcatacatatatagtaacagtcagtgtttctcagctttactctaggctctccttctgagatatattacagcccttcacttgggcattggcagagtttgtatgatgtatgaagggtgggtcagactgagagggacagtgatgaatatatacatacatacatatatacatatacaaatatatgcatatatatttgcctatttatatatatattaaatacatatattttcctgttttagctgtactccatattttcccctcttaaaatcttaatttacctctatagtcagcacagccaaacttcatgacactgtttgtttatgtaccaaatactttagctcctcccttttagacattgagacttacttttactgaatcccttcagcggaaggctacagcttttctcttagatgtcgtaccttctctattgagtctgttgttaaagcttgcatattattttcctctcatgaagcttgcacagcctttgacaatgtttctggtggtctcagggactctagtcattacggtaactagctgccacatgctagccaagaaaattatcactgggtcccaagttgggtcagcttaagcagattcttagacatgaagcttacagtccaggtccagagggtttcagaagtaaaagagacgcagacagagggcattccaggtgaagggaatgaaaccagcaaatgaatagggcagaaatggaaaggagcgagtcatgggtaaccagagtgcctagtcaggatatgatataaactctaggtaccgagctttctgtgtggcgcctttgtctctgtaaggccagctctgcaagctctggacctgcttggctttgagggtgcattggcctgagagctattgggagaaatatccacgtctgcattccagactataaaaccaatctgtagcaaaagatcacaacatagggaactctcctgggtacatttcatatgtacctcccaagatgaagtgtctttgtaaagcttcctgctcccagcagtagaatgttttactacatacactgccttagctagagtaaattctttagagctttttcgtcctgtttgtttgtttttgcttttgcagatttatgcttactatggatttctctaaccaagttagatggaggggaaatagccaagacataaatagtccaatcagataggcttgtgtgaacagggtggagctttgtgagaaaataaactcctgagtaccagaacggttgttttcatcttaggcatcagtctgatatgaagggaacattgacaggcaaagaaaggcagagctagtgcttatattttctcttggatagatgaaaatagatcaccttgctctttgctatgtgacttcttaaggtggaaaactcaacaagtcatacaaggtacacagaccctgatcagaagaaagcaatgtttatctgaataagaagaggaattgcctctccatctcttatgtagcaccatcaaacactatggctggaaggactccttagagccagcccacctagcatccctgttctacatggaggactacgtgttgcattccttgcctgtggcctacaacaatagagccatggatagggatccaaaatcttctgagatgctcaggtagcactcagtcaaactactccatagtttttcctcagttcctctgtcttagatttagataattctaacttttcttcttccagctacactgcttttttatatcttgattacctactggcttctcaattaattgctttggagacatttattttataataattaattgctgggttcctataaatgagtctaatagttaagatagcctctcagatgtatcctaattatttcacaaatacagttaagcttgccagatggacacctccatcttctttttggatgactgctgaaatacctgtagaactgtcttggacaatactagacctttcggattcatctctagggctgcagacacttgctgggaggtataaacagtatggtcagagttgctcttttgccctgtgtgagctgtgcctaggatgtgtttaaattgctgtgcctttgtaaggaaggaattcccactaccatcaatttccccagttcctgtcatcagaccagttactacaaatggattgcctgtcagcctccaaaacagctggacttagtgtgttgttgctgttttgttcagtgtaaaggagaaagaacacgatgagtgtctggcatggctaggttccctttcatggataagagtccatcactgacaacagacattcaataaaaggggcagaaaaataaaagtgtttaaaaaaaaaaaaaaaaaacctttgagtcacttgaagatattagctccaagcttctgatacgatgccgtgtggtctgttgcccacatatggttattatgatctacttgtcagcaatgagccagaaatactcttactgttgcaatgcaaagatacataataatccatttttacactgcaaatgcatgtggcccatcaagtccttgctcagatgccaaactcaccactgtgaaagaactggctgacatagtgccctaaaatttcaggtaagtatagttacctcgcacaggcatggagtgagcctggtttttgaagccaagagaaggagaagcaaaactctgctcttccctaagtacgaaccatttggcaatagtcgcagtagttagagggaatagccttttgtgaagaaaattgtggtgtctcagggctgtttttattaaaacatttagcccaccagaataccaattttaagaataatttaattcacaaagcatatgaaataaacagaagagtctagtcccaacagctgcatcccaccactgtgatcctgctgtgatgcagggtgactcagtggtcaagatcccttccactgctctgcatttggatatttgtgaggggagaaaaaaaaacctagaactcatttcctttaatatccatatggcatgtagcaaaaccaccagagaatactgatcaagattttttttttttgccaattctacccagatgttcaggtaacaataatagtcatctcctcctccctcttattttttttcttcatgttttcttctccgatctaatgtgttccttgcttttctggattggaatcactccttaaaggaagtaagcaaagttcatcccatttgcaagaaacatacactactgtgactggtagtctgtctcgttgtggctttttgtagcctatgcaactgaggagcacatggaagagccagtcagtactcggaggacatggtttagcttacctagtctaatccactgtttcacgttacagaacaatcgaaggtcctaccccaaatgaatagcaggatgtaacctctctatgtctgtaatttccataaagtcctccatgatatctgggggtattggctcctagggatgcaagctttaaaagtatgtcctggcaatgatgtcccacaagagggaaatgtgagttggtgaaaaagtacagacatagatatctttgtaatattttttctcataaatattttaatttgctatcaagaccccatttgatcttcaatcaaatgagtgatttaaagaaaaaattatctttgggggctggggagatggctcattgagtacgattgcttgctttgcaatcatgagaacttgagttcaaaaccccagtacccacataaaatgctggacgtgactgtatgcgcctgtaatcccagcattgggaagtaagagacaggcagatcccccggcactcactaaccctcagccttaccagaacagagaactcctttctcaaagaaataaggcagagatagtgacacaagaacaggtagacatcgttttctggcttttgcacttacagatgaaacatacatacatacatacatacatacatacatacacacacactttacctttgtaatttttctaagtcgtatttcagtctttccttcctatcactgggattttgggtaatcgtcttaacaggtggctgggaggaagtcatgtgtgaaaactcctcatagcttatagcaaaacagaagatatgctcaggagagaagtgaaaatccataaatgcagttatccccccaccacaaagagagtagtttagggacactgtgtgatgctacatggcctgcatggggaaacactgaagccatgttttcagttgctttttcctccctggaaattcatgcaataaacagagccaagaaactttggaatatactctagtgaaacataaaggagatgagaaaaaagtcctctgaaactccaatttaaccagtgcatgctagcagccaatccagtgtataactgcctcctttgtccttagggtttgacatttctgtacactaggaaaaagagaatatatatgcctggtgtgtttggagcacttggctgtttcaaatacttttaagatgaatacttgtttcctgcatttccttaaacaagctccgttaaacatatcagttatcccacaatgcatggttattcagtaaattgaaaaaaaaaaagaaaaaaaagaaaaaaaatcaatcggacccttttctttctccctttgccccctcctgtctgtcacactgtgtgaggagttgagtgtgtgtgtatatatgtgcatgtgtgtgcatgagtgtgtctgggaggtagacagattccctacctggaaatggcttgctattattagatgttcagttaccaggggttatgtaagacaattgaagctctgttttttaacagagacatgattcatgctgcttgtagtaacagtaaccacctccgaacgagacagaaaccagacacagacaaaggctggagaaatcaatgccgactcactgcagcccctctcccgataccctctgcctttcaatcagggcacttaggttatcaggaaaggaggctcctgctaattctgggtctgatctgtctcctgggactgccagataaattcatgtgtctggagctagacacagggaaaagtaggcttcgggagctgtgacatctgagccccctccctaggatctcgccagcgttccccacctggcaaggaatagggcctgcacctgtgctaggcacagatgtcgtcgctgtggtctacttagaaaatttaagggcttgagtgttaggatcgcccactctcagaacttcccctccggtgatgttttcagcttgtcaagagaacaaagggtgggatggtattaaagccgctacccccatttccccaaactccaccagactcggacttggctgtcagctctcacccagatcaagacccttctctgggcccttcagaccacaccacctccacagtatccaaagatttgcacatcagccccacagctgagtaggacaggcagtgaatctcaaccacgacttctcaggtgcaaatgaccttagtgcttaacagtggtggtggctgtgattttatctataggaaaagatttgcagctgggaaagttggtggcctgaatagcgacatgcaactactgtcagatgcagagagaatatgcacatctggttctttgacactacaaagtttggtggtaaccgggacatatattttttttttaggagaaattaaaaatttaaaaacaaaaagcattttctcctgaaaacttttagaccacactgtactactcactcagcaggcagctcaaaatcttcccctcccctctctcctaccccagtcccacaggtcccatttgtgtgaatcatgacgaaaactcactcttaatgaaagtctccccatgcagtagcacgtccctagcagtgtctccctgtccctcccggtgacatcccagaaagatgtggatagcttaggcttcccccagaacctggagacaaactacttctgctgcaaaaagaaaccggtgcttgactagaaggctcgcatgaactcagaaattagctgtcctgccccagttaatataccccacaggcaggccgctgccctttactctctctcaaatgtgtaaaccacccagaaggacagctctgagtgtagcagcgacagagaaatgtctagccatttagtttcatcaagtcaatatctcatgtgataaaatttcatctttaaaaatacttgtattgattactagtaatgatcaatatcttgatacattcttaggactattgactatgaactataggaaatctctgctagtacacatgttccttacctttcaaggtaaaacatttaagtaagcattctcattttatataaaagagttttaattatattctctgtataccacgtctttaatcaagaacagcagtgaactatttcacagaccccagatcatgagcattttcttttctgctaagataccaaagtcttctgttccctcggttttaagggaaaaaagctgtactcttcctgcacacagtaaaacctcctgctcctgcatcccgggactatacttctagccccagtcttagtacaaactcactattaggaaatacgctaagtctctacttcagataacatctaatctgcagaactcaaagccctttgatatctggttgttatgcactggcctgagaaaacctgccctgggctttctgtgctgctgtagaaaccagttttatggggaagatggacctcactgtttgggggtttgtgttgtccaagtggctgccaggcctgccttagcttacacaacacagtgtgtctccagactgactggagatagaggctgggatatgggtgaaaggtggcagagaattctagacatttgctgcatgccctggtgatatctttcattttcatcagactaccatgatttaatgatcattaataacaattttccttgacaaaagcgtgttccaggacttcccttcctgggctgtttggtgttctttattcttttatctttctctctggtaaaaactaagcagtcttgcttatagataagaacagggcagcctttgcttttctcggtttagtcttatttaaaagccttagagacatgtggtggcatttgctgaggtgacgacaataatagtggatggtaggtttttcaacaatggatgatacattctacctgaacctttaccatcctaaatgatcccctgcagaaatcagagttgaattattaggcctctaagtactctagtaaccaataacatgattagaacatcctactgtgtgcataggcctgcagtagatgttgatgtttctgtaaactactagacctctattctctagaggactgtgacacactcccaatgatacatagagcaggcagtaaagagtaactatttatctaaatcctagtcagtgtcagaggtcaacatcacccaaagcattcttcccaacagagtttcataaggactagttcacatcctgtgggccttgaatgggaagaaagtttaggtaccaatgaaaggcaacaaagatggaatcctataaatttgaaaacagtctgttcaaaagcttaggggtacaactgtatttgtctttcttccccctaaaagttaacttggtaatactaaagggagtattaacagaaagaccctattttatagacattcagtggcattcatcataggcaaaaacaaaacaaacaaacaaacaaacaagctttcccttgatggtcctctggcattttcttaggtaaaataatgtcccattagtccagtaagcttgggcaaagcatgtagggattcctaaatttatttaaccaaaaaaaaaaaagtaagatttctttttaagtatttatttatttgtgcaggctgaggggctgggtggagacagggcaagcacccatggaggtcacacttgtggcagtggtcagctcagggtttctaactcacaggtcgccagagcattctcaggcttagcagaaatggccttcacacactgagccatcacactagcccaagtttttattaaaaacaatagttaagggctggagagatggctcagctgttaaaggctaggctcacaaccaaaaacaataatttatgtgtgtgggagctttgtctgccatgcatttctgcacacatatgcatgcctggtgccaggagaggtcaggggcgaatattggatcccctggaactggagcctcaaaaggctgtgacttgacttgtgggtgcggggacttgaaccagggttttctggaagagcagccagtgcttttaaccatggaggcacctttccatgcctcccttcacccacctctttttttcttatgatgctttttaaggtactagtgtcctgtaacctcactctgaggcataccacctttaaaggagttgacggtgcagagttgaaaatcataccatgttgtaatgatcagtgctgttgacaatgaacggaccactaactacagagaagtttcagaggtgaatccagcctacacaataggtgaggactgcagaggagaatgtctaaagcaagaatcaagtgtggagggaacaagaaagaatggttctatcttgagtaataaaaatcagaggtgattaaaagagattagattccataaacttagcacgctgcagggcagctgcataggagctatgcttatcaactgagaaagaaagcagaatgagcaggacttggtaaaatacaccgaggttcgaatgtggaaacaaggagcaggtttggaggccaagattggagcagatagagggccttatttccaccaggggcagcactgagcaactcgtggtcatctggattcatcagtgaaaacattaaaaggaaatccagtacataaaagtggagacagacaggaaacccaaaggctaccaaggagagaactccattacaagctgctataggccacacctcagggcagtgtgacaaaaacctgatgttccatcctacattgctcctgcttcatggcctatggcaaataactgtatctttcctaaagcatctcagatgccttgtctggatgtaaaataggaatacaatacctttgaagagtgaagacatgaagttaagcaatgaaagaaaatgtccttttaccatgtgctacgcatttagttaggggtagccaaaattggcactgaggtgaggggatagaaaaaagaaagtgaaattctctcagagtgtgttatctgggacaaagctactgggatgtgtcttcgtacctccccccccccccaccagtaaaaaaatggttagtacagaaaattataatgcaagagacaaagtataaaaaacggatataccagaaaacattctggcccgcagatcacgtaccagtgggatctgtatttcagaatttaaagaaacctcttatccagggcctgtggcaggctttctggacggaatgactcagggtgggtaagaaggggtgtcctgtcaccaccatatatctatcacctgatccccaattctcttaatttaaataagaatcaactacctgaaacactaaggctttaggggatatgcagttcttattaacagagtttgtgaattgtcaaaaaggaatcaggggtctctgtggagaacattaccgtaactcgctgtgacaaacagttgcactgcgcttccactctctgtggcaggaccatcccaggggtctttgagccatcgggggtatttctcctggacatgagtattagctggtggttaattaacaagctacattttaaaactgggagcagttctcccagcatagagaagctgaagccacgtccctgatcagcctgtctggccatgctgcctctcatgccttacttgttttaatggtttctcgccagtcttcatcagctgggattagtgatatcgactagggaattggtttcaggtaattagttaaaaaggtaaaagtcaaatagatttctttaacatggttagtggcttcctaggttgatgagctctgtaattcccacagttttcttctcaggaggctgctacaattttaagggaccttaaaatcataaaactcatcccttctttttacaaatggaaaaggtggtcactgagaagccagatgatttgcctaaggtcacccagacagttctagaattttctttcccttctcttagtcttactcctttgagttctctttgaattctctctctgcccccccccccccgtgtatacacacacccacacacacacacacacagagagacgctctattcccacagttacctcactactggccctttctgttcttgcgtttgcccctgtgctgtgacctcctgcgcctcagcatatgagctaaagggtcttgggcagccagttacacactccccgccccccaacacacacacacacacacacacacacacacacacacacacacactgactcgatgcttcacttagagtgaagaaatgagggaagtggaacaattttaaatttactgtgatcttcaagacagctttttctacacctgggaattgctgttagacaattaaggttagtaaagctcattgcatttctcagaggaaaggtgttatttattaccagataattattgttaaaaataacaataatgtaaaaatgggactgtggcatgtttgagacgttatcattcttaggttacagacgttgaggggagttattggcaatctagaaacaatagtttgttgttgttcacaacatactccatgtcagaaactcctggaattctgatgtctgatgactggcccaaaatcagaagccatgttattcagctaaactgcccctccaaaaacaaacccctattagaaaagagaatgtcagatgtaagatgagtggtatccagacctatagtatcagcatcacctgggaacttaccaaaatgcagaactgcagactccacctagacatactgattcagaaatactagtgatattaaaatcatgttctacagagagagagacagagagacatcgagagagagagaacttgagactgatataagacattcccatcttcaattagaaaggagttacaaatgaactatgcatattgacaatttcaaggccagttcttcccctgtgactcttgactctcaaggaaatgacgccctgtgggaccatggcaagaggcactaatgcacctgtacattgtgagaattgttttctagtggcaagaatacagaagatctgaatttgaattctgtcttcactatcttcaagctttctaatcacagacttttcacgagctctctgagttcctcctctgtacactgggcatagtaatcaacatagctgagaaggttaaatgagaatattttcatatatgcgaatctgtggtccctgataaaatgtcgacattcataaatagctgttgttgctttcacagtgccttttatgtgagcttctaccccaaagcactcacccattttatactgacttgatgatctctgagaagtgagtagcagtggccacactgaagtcagacctcagcctcatgtgatgcatggcattgtgttccttagcagctcaactcaactggcttccaaggcaggtgtacagagacaccatcaaagctacaggcagaaaagaagtgaccctctgtctgatctgcatctgacaccatcatgaaacttgctgggttctaagagcagactctttattatagtgctgatataagaggcagggggaaacagatggatttccagatactaagtagaatttgtggcatgagcagccctttaaaattaccttttaacttaaaaacttagtacactggatacagaagtcattaaaagggaataaatatgaaaccctgcgaggtcattttcactgagtctttattttaggagtataactattctttaagcaataaaacatgagagaccatgcagtagctctgattagtagaccctcaggtgtatgcaggtacctgagaggggaaataaggaaatagggttagaagatagtctgccaaaaaagctggaagatcatagcggcgggatgtgaaggagaaggctttgattaaaggacaggaagattatggctctgtttaattacaaatttcacacttttagtaaactattgtatgcgctgaacatgtacagttacctaattacatagaggatatctgtatattgccaagtaactgttcactgcagtgtgggagaatattgatcagtgattttctttattatcttaatatagttgccagaagattgaaaagttcagtgggatgaagagttaataatctctagccatatggtgggttagaaagaacaatgaacaccttgtgggcccagttttgctggttatgtggctgctaaggtaaatggttcaatgcatagcacctctccaccataccagtcaaaacttttgacaaatattactatcttctttctctgctgggaaacgatgagttgatggaacctttggtaccgtagactaatatttaaaaggaagccatcctgaccaataataaatgactgataggccctggaagatctgttttatttgctatgataaacaccactatcccaagacagttgttttgggtttagttttcgtttggtttgggttgtttccttgttcatttgttttgttttagcttttcatttagaactaagaaaagatgaatctgtttgaggtcagaggagaaatggaacaaataacactccttccatctctggaaaaaagcaaggcaaaaaaaaaaaaaaaaaaaaagaagaaatgagaagaggcttggggcagccccgtacacatttctatgagtaaatcattaaataaggagaaaaataagtgcacatttaagttcgcccagaacacagaaagtgagcaagcctgctgggaaaagaagcatcaatgtagcaagactgtcaaacggctatgatgaattcaactgcagaattgatgtagcctggctctgcgaggaccatagctgaagcagtggcctttcaagcgtgaggagcctcattccagccttcagtcttggtttatcagtccagcggtatttttcagtattgtcacgattgttactgctggtaatgttagaaaagctgcttctttgctgttgtgatccaccctcattttaaggcatatcaaaacataaagtgctatttattctctcagtctgttgaagctaataagtgaaacaagtttgttatttttgaaacataatagacacccaaaccctccctgtctctagtctgatcattgctcttggtggtctggtgaccttattgctattcagcaggcactgacatatttaaagatacaagaccttttctatcagttgtccttgcttagttactaacaaggagaggaccttgagcaagtcggctcccttaatcccctgtctgggcacaaggacagtggagcagatgagcttcaaagtcctttcagttcatcctcagtttctatgacttctaagcaaggttcttcattcctttggaatcccactcagccaacctcagctgcacacacatccatatggtaggcattgcttatgcaaaaccttgtactatggaggcaggaaaagaggtgtgctcctgattctgcgcaccgtaaaaggatgctgccaacacctctgtagccaaagacagtcataagagaaaagttcaagagatgcattagactacaattcctgacactagagatttcaggatgaagacccaggatccagggttgctgtcagtgtttgagctggctggacagtggacagctgtgtgggaatatgattggtcaaaaggagtgtgacctaatggtagtcgactgcgcacagaaacccagcaagtcctgtctgttcagattcttgctggcctctctgtacagcattccttctatctgggtataacaggaccatttcttaacctggggtcttaagatcttctcttccaaaacaggtatgtcagagcctttgtagccttttcctacatagaaaggcacaggaagagtagaacagtatctttacgcatcatggtctgcttttagggatggggttctaatgtctatctcccactttgcagaaaagagtctcttgtttctgtgacttgccttatgaggagaggggagggcaagagaggggagggcagagagaaaggttacttctgaagcctccaccctggggttttgtctctgctttctggaaatagggagacaaatggtacaagtggtgactggagttggaaaatgtgccaagggatcctgcaaatcagtgcttgaggagtcaagggcatttatttccctttgagaaatgcttcctaaatgaggtggcgtttagtggctcttaaagaagttatatgttgacactagagagagaggaaagtactgtgaacatgtatggaagaatggggctttgctgatgtatagaatgaaccatagggaaaagaatcaaaaattggattggagctaccttataacagtccacaaggagttgttgctcaaaggagtgttatacttaggctggcgttgtagaacaataatgtaacagtagaaaggtttaatgttggtaaagtggagagaaactacaagaatagaggcagtcaggagatggtctcagatgttctgagagcaggtggtagacccaatagattcaagaaagctggccagagaaagaactatagggttggtggctgattccataagggaaggcaaaaacatcaggatagacatcactataactgctcagctacagacaaggccctgagtagaaatggcagcaagagtgaggaaatgaaaactctgggaaagcaacaggttctgaggaaagagagcaaggcctatctttactttctaaattaaaagagtctggtactattcaatggcaaagctcgttccacagcgttagagaccctgatttgctcatctttcccaagggtctactagacacagtgtgcacactgggcgaacagatggtgagtacactggtcactggcggagtacacagtataggtctggtgcactgcagaaagcaagagctggagagagcaatggagactctctgagaacgtgtttgctgaggtctggacaagttttctagacaaagcctgcagtgagaatggtaaagaacttatctatcgagggaaggggagaaggaaaaccagccagtgcgggagacagaacagcacacaggagaaagggagatagtcagggtagtgtcctgcccctatcacaaagctgggtaagtttcagggacaaagtggaccctgagcaggacccagaggacaggaatggggtggggaagaaccagtgagctggggacccctggagacagatcataatctgtgctttctaagactgtactccctggggttaaaagataagaaagggagactcttctgttcttctgaagggggacagagagaaggcagaaattcaaaccaggtaagtggctgtcttcaggagaagcaatggctgagcattagagaggcagagacagaagggaattaaacataccagaactgtgatgcacataggcactgtggagtactactcagccttgaaaaagaaggtgagcttgtcattgtacagcatgagtgagcctagaaaaccgtttggtacaatgagccaggcacagaaatataaatatggcatgctctctctctcatatagaatccaaaaaaaagtggactgctcaaagcagagaataaaatggtggctaacgtaggctagagggatgttgttcaaagaatgcaaattttcatttagacatttttccagtctaaacaaaaattttattcaagacaagacaaataagtttaaagattttttttctccttcctttctctattctcttcctccaggcagctactgagatttacagtttgcctgccctaggatttaaaataattttttaaaagtaatcattatcaacacaaaacataaatatgtgaggttatagatatgctaattagcttgatttgtcgatcccacaatgaacacaaatctcaaaacattgcgttaacattatatgtgctacaaattggtataatttgtgtcgactaacaaccaaccagtccatggaaaacatcacagaatgatgctaccccccactctctcctttctaatcccctctctgcttcccaaagccactccatctgcactgcccgggtactctgatgtctcagaccatcccaggagtcagcagaaacactgtggggacaaagccccttctctgccttgccaccttctggagcaaagatgcggacccagctgcagttgtgttccttagctcatctcttgaaaacactgtgaaataaacaaacaaagcatgcaatagtcatgtcctactcagctaatgaccttgtttgttttgttgtttgtttatgctagatgcagccactctctgtcccctgccccaatgaacatctgcactaggcccaagccttggagtgatttacctgaagagtgacaccaattatctggaaactactgtaagtacattatgcctctagtgaactcatttactttgtttaatggatgtggtggtggtggtggtggtggtggtggtggtggtggtggtggtggtgagaaaccatgcaattgtaacagtgggtaaaatttcacatagcttcatctctttggttcagcacagtaactagtcccgataccagcagcagagtccagccaccagcactcagtgcatgcatacctgggtagcattctcccccgcccacacctggcaggaagtaaagctgttcagcttggtcctgttgcctcttcccatgatggctgtggctactcttgctgtgtatacagctcatcatttgttaatctacagcctcatgcttatttgtcatttcatgtcaccctggtcaaatctgggagccagcttggcttgcccgtgcctacatgatctctgaaatgcataccatgctattgcctccctgcaaggataaggagccaagccttgcctttgggactctggccccttccaccatatttccagcccatcctgccagctctgctctgtcctctggatgcatggctctgtgtagctgattgggttccttgtacactgggcatttatgtttaaatacagccttcacaggaaagtgtgcacaaataagatagggcaggagattcaacatccacaggaaaataatgaaaatttattaactatattgaaactaatagatgaatatatgcttttttatactaagaaaggctaaagatgtgaattgtttagaagccatgcatacaaaataattacgcatgaaatctcattttaattgtacttacaagtttttctgtacagtatgaggcatataatgggataatgctttttttttacttaagtctctgttactggaaaacactaaacatgggaagctaataatcttcttaggtaccaggtaggacttttacatccatagtacctacctttgtctttagttgttctaacatacctcaaaaccaaagaaatgaagctagaattttgttttgcgtgtttttacctataatgtgtttggtgtcgtggatggtagttgctgatagctggcatataggtgatgggcaggcctggctggccaagacgggcatgaaggacagtgaggactgcggattgatggcatgagaggagaccacacattgcttcttcagtgtagtcacacagagaacttacttgcagactttatccttacgttcaagtacaagacgtgcacgcttctcacatcggaattttccttcagcacagagtaaagcctgtgtcagcactgcagcactgctagggtagcacggtgtgtgtattcttcgctgctcctacattctcgtgctgcagagaactcagacctaacaactggggtctaatccttcttagaaattgcaaggaaagctacagtcacatgttattgtcacagaaaaatattttgccttctcctgagctgcagagacagggcagactgagttacaacccaatagtctctgctgttcagaaaactgcttccttacacacacaaaagacataattcctaaggtgggaaggatataaacatgaactttgaagcagtgtgtccttcctggggctgcgtgtgctctgtacctgttctcgccatttgtgaggtaatgatgaagcagtgctgatttgaacacattacctgtacacatgcgcagggctgcctgctgacactcactgttgtgataattaaatgagatggtgtatatatagggtctggcacggcagagatgagtatgtctactcaatccactgagatgtactgagcgctcagtgggtgtcactattctgggcaccgcgaagtgtagcaaagaacacaaacaaagcctcacttattcagtttgccggctctataaatggcaaacagacaaaataggttcatggaagctaacagaggactgatctgattttattttgctttttccttccagaaagtataattgagaggaacagggtgaaggaaatgcaaatgcgaaagggaagcagtaggtacgctgacgaatcttgccaccccatctcccattccctgtcctaatgcatgacccagcgacctctcgggactccagagcccatgctctccaagtcagactgtaagaccccaccctagggccatcctgctccttcagagaaggtaccgctcttgccttccagtttaactgattcaaagatgagatcaacaactcttcgttgtctctctcccgtgtcttcaccatgctttgagcatcccttagtctcacccacacctcagacatggtcccctccattcaactcccttcagttaaaacctttatatgtgccatttatttcctgccaggatcctgactattgtgagggaggaaagacactgaaaaaatatttcaaatcagccctgccaagaagaaaggggggaaagattgagataataaaatgttttaatcatgaaaacattttaaactaatgttagaatactgggccatgtcttgaaaggctgaatggtaagaaggcgcgataacccagagtcccgtaggtggtgtccatgaatagccacagtgttgttcaggctcatggcccgccgcagcttgcttgaccctcagctccaagggactgtccacacagctacagcaatgacaggcatgtgaacagaagggggcagttaacattccttctccattgatggcagttagcccctgaaccagatattcaaaatactgctaagatgaagatcttacttatatagctaacatgaacaccacaggactaatatttttcaaaaagccccattctccagcacttggttctggaccagcactgtgctaaacacaacctggctcgtctcctttattcttaatcacagcccatagctggaaggcattgctgttcccattttacagatagggaagataaggcctcaaagatgcaaaataacctgcctcgggcacaaggctgctagctagtggagctcagttttcctaaattcccctccctaggtgggagtgtcggtggctttttccttcgtccctctccgtctgtccgcagacactctacagttaaacagcagagtaagtaaggaaatggttccgactccagaaaggccaagaaaggcatcactgatctcaattatcttgatcccgcgactgcgtaattatttatcaaagggaggttctgactaattctttcctctccagccaggctgattagtggaaagcataatctgcagcagagggtgggagcccagtggaaggagagaattggaggagagagggagaaagatggaagagagcactcgcctctcaacagaccctggagactgataagagctcgcatggataaaatatttatttttccatatgttgcagaaagcacttctgccactgtatgtgtgcaatatgtgcgaaggagtgtgaactgtatacatccaacaccaccgatctgccttgttcccgtgcatttaacaggcttaatacctaacagcgcatccatatgttttaatgcatatttctctgcaaaaacaatatggtctagtttgggacgagccagcagcctccacagcctcactcactgctatgtttcagccctcaacttactgccggggccagcacagggagagttaaagaccagaaggttctgccggccagctcagctgcccttcaccttaaacgccttcctggttcttaaagcagcctttttctcataacaaaaatgttcacagtggggagatgaaaatgtttttgttctttggacaattgggacatgttcagtcagaatgtcagaactgaccgttgaaaggcgggtgcctgcggccacacttctctcttctctctctctctctctctctctctctctctctctctctttgaatgcagagctgcaccagtgtggcgggaggaagtgcacaatgattggcctgtttttctgtagaagtgttcagggtacacccagttttgctttgcatatatttgcgaaacatctgcccttttcttgttctgaagtctctctccctcacggcccctttctcctctcccccgggttttttctttgttgttgttgttggcttctctgacttctacgtagaagttttcattttctggttgagggacaacctcatcagagtgtatagttgagagagagagagagagagagagagagagagagagagagagagagagagagagagagagagagagaatatgaatatgcacagcaggcggggagagaacaaacttgaaagagactgagaggccaggccagagagagcttggcacaccagcctttggcatggtgaccaggaggaaggttctggtagtttaggctctaaaatactgcctggagtcagccagtgtgctgctgccctctacaggcgccaggggatagtgcaaactacttagacttgtacagacatgtcctcagatgtgccatgtttatacaatcccctttatgcaaccaaagaaggcattttcagttaattacaagagagtttgctctttcctccttaataaaccacaaactgaaaaaaaaattggtcatagaacagcacctgtgcatgtcagacagactgctgttttgtgttaacgcttcttggcttcagaaaaaggaatcccagagaattataaaagaggttggaatgggagaggaagtgctccaacggacagtgtgcagggctctggtctgtgacgttggagcactgccgtggtaagaggagaagtgaactggcaggaagcaaggaagggaaggggccaggcaggttgggtttgaatgtgttctactcgctgaggtggctacaatgtccctgggccatggacagccaccaaaggtggtcctggacataggtggggcacagaaaatcaggcatgcatcaaactctaattcaggacaagaagtaagggcataagccgtgcaatttctccagagttagacctcatgggtggcttggcagtacactggtgcaagagtgtgctcttaattccatgaaccacatgtcaaaagctagctgaggccttgtctgtaaacatagagaccatttttttttctgctacataatgatggccattggtgttttgtccctatatttaggtgacttacaaggaccagccactcttactaaagactcttcttgtaatcaatgaaaaagcaaccaatccaggttgattcccctgccgcataaaatgaggaagcttaattgagattcaaactaggactggtctccaagtatatttaaatttcagctctatttaattctgtcagcaaacagttcgcaagtggctgctgtgtatatggttcacagtatggaattatggaataggcagtaaccccaggaggacaggaccaagattgctcagcctctgtggcacatcacagccacttagtctctgtaccgagagtgtggatgggggagtgggggaggggagcagaaaggcggagtaaagaaagggatgaacaccagaaatgggacaactgctaagacactccccttccacagaaagcccattctctctgagagccaatagcacggaactgttagtgaaataaagagttagtgagtaaggcaggaatcctgcaaccactgagggatctcagagtgatgcagagaggagccatcctgtctgaaagaggggagtcacagcagtctagcatagagacggcatttaataagtgtgaaggaaggttcctctcatttcatcggcagagatgagaaaaggcagttcaaagcaaggacagtaatgagtaaaggtaaagagccaagagtgtacattccagacccctgggaatgataaacgcacaccaaggcagccaatacacatggcccatgagataaggtagggcagataaggaactgtcctcagattccaggctgccacggtgctgcgggatcgagtgactggaaagcagcagagctagggtcttggaggaaggagaataagtcagcagcgcagtagggaaagcattgaggctgccgtctgcagagggagcaggctggtgaagacagctgggcaagctggccacggggcaagagaaaagtgagcaaggggcttccagccgatggcaggccccagtggcagaaacaggcccctcagaggaaacactgcttctccaggggaaacagacagtgggagggggcagttagacagggaagactttgatttttaatcctttctgaatctgaaagaccagaagagcagatccttgggggtcctgataggcacaggatttgagggttagccccagacccccatcagcaatgaataaggcactgcggcttgtttctgttatgttggctttctccacactgagaaatatatctgaaagcccccaactccatcctcatctttaccacgctgtctctgcctcatgccctctgaagaaacagatttgatttcacaacctgttggactaaaaacacagcatactaatcataacaccatattctgcgagggcagatttgactacccagtacaacacatttcaatacgaaatattctgtatacaagtccaaagccatgctcatagaaacaagaacatggaaacacagcaatttacaacagattatgtaccacacataatctatccaaaaaaagggggggggggacccatactctatggtagcatagtgatagaaaaagacacaaagccacagaaactggggacatgttcaagaaggatctcatcccttttggggtgtccatgcgctacataaatgccgatttgctagttatcattgattgtcatggagaaaaggatcctgggctgactgatagctgaactatttcacattctgttcctcactaaatcacaccaccaccattctactccctatcagcaatctcttcctcagaaggcacataaataccagtcatgctcctaaactctgggagcctatactaaaccaaagagcatggagaatcttaaggctgggatggagagagagagggaagggtatgtgtgagacaccattcatctttgcctcttagaacctacaccatcttaatcgcttttcacttcctactttacagtcacctctgccactaccccttcctctggacagcctgcagatggagactaggatttgaaattctgtgttgctttcacataaaactaatagtaacagatttaaagctagaaggagcgtgtagggccttctaatccaagccctttattttgcagatgaggaaactgaagcccagagaagtgaagtgaggtgcccaaagccacacagcaagttgcaggcacagctagttccgtagctcaagtctcctgactcccagtccagtgttcttcccattactccacgggtcctgtctctaagcttcctgacaaatgctagaacggtaaacctccactagtatttttccagaccatgttaaaaatctaaggggggaaaggatgctttcttggataatgtcagccatacgtagctcaagctgtctaaagttctgggacagggtctttttatacagccaacagagtccaaatgtggtgctgtttgcttggcccatatgctttcgtgtgttcccagttaggccattactggagggaaaaaaacaagaatcagcttgttttaaaacaagggacatactggactccctcccatcccccttcagaaaaaaaaaatcaagttatctttaacagattctaaaaatgccttttcccaaatatgcagtcagttccttcaaagggccctttgtttattctcaggaagaaacccaagacagctgaaaaccagaaggcatctgaggagaatgagattactcagccgggcggatccagcgccaagccggcccttccctgcctgaactttgaagctgttttgtctccagccccagccctcatccactcgacacattcactgacaaactctcacgctcacaccgggtcatctgattgtgagtaccgcagtgaggtgatggtgtcttcccaaagcttggcgccgtgcttcccccccacccccccaccccagggttctggctgttttgcattcagagcaagctgtttccatttggtcttccaaagtagccaaaagtagcatgccaccattttgatccaaccagcatctatatattttcaaagccagagaatattttaaagccaggtaaccagccacttggcctccgattggtgattaattgcatgtgaccctgttctcttttgagacattaactcaagaaaagaagtgatatgccacttcctggtgttctagctctcggtaacagcacttcgaccaaccgttactaagtagaataaccaaatatggacctcagaaggccagtgagacacaaggaaacagccatttccaaattacataacccaagtcagatttgcattagttattggaatctcatgtagcttggctgaatttcggtctttccagttcttaatttattttgaagtggttaaaggatggcatacatttacagaagaaaaaagaatggcttccaagaattcaaaagccacccagacttcgaatagccaataagaatgcaggttaaaaatattttttaattaaaaaaaactgcctacaagctaaatttggaaatgggcacttaatgcaagtcgtcactattgaaatcacttctttgctgtttatttttgccatcttctcactaatctagaagtcacttcttaaattctattttaaggaagttggtagatcacgtgaggaggctgttttttgtgtctgaagtgtaacccggcacttgagagaggagcacatgttgacaataccaaaggacacagcattcctgttagctaagatacccaacagctctgggaactgatctctccacaggacggctggtaacaggcagagagccgacatggggatgagttaaatagaccaggaaagctttattaccaaaaaggactccattcatcctgctcctcacagacaaaatttaaaaaaaaaaaaaaaaggaaaggaaaggaaaggaaaggaaaggaaaggaaaggaaaggaaaggaaaggaaaaaggaaaaaaaagaaatctccattaggaaatgagattccaaatctcttgctattattttctggcagaagaaatataaaattctgcaagtaggacaaaggtgagtgggtctaggagactcctcccccactcactttgccatcttagcctctagataagggggtatgagctggggcaggggctgggctgtagccacactcaactgtcactagagaatgggaacaaagtgagatccaagttactcaggccaagtgatctgtaccatcagactacggcttctgtttagatacagggggcagaagcagggacttgttccctggagcatcttggtagtcacctagtcatctttcttgcctggaagtctccagcctaacagtaattacaggaagaagttgaaaataacctggcacgacgcccatagacatgtgcacactacactgcccctgccttccagaaaagtggcctttggagctggtgaaaggcctggagcctcagtgtgcacaccttcctggcctggctttctgccatacctatggggaagactgcctaggatggccctagcccagaaagctggtacaaaccaaatgaatgtctttccaagtggaaaaagcactatgcttcacatactgtacagcaagcatcctccggctaggccttacatgccctactagcctagcatatgtagaaggaacagcaggacaatgctgtcactgcagaccccttggaagccagaagagcagagcttaatggggtgtctgaatgcagttggaaagagacccaaccaggaggagaaacctaatctccagctgtctagaaagtcactttgattttgccattaagatgtgtaagtaagtctctgcaccaacctgttgttgaaattggttatagttctctccaaacgtgtttggattgtagtttgtcctgatttgagcctacactgaggggaaaattgtttttaggaaagattcacagaaatctgtccatttggaggttgcctgagagaagacaggaaaggagtttattttaagctgttaaattttttggatgctcttcttgcattcaagaagatttttttttttttactttcaaatgtcattcttaccatagattaatttaaaagcctaatttctttaaggtaaaatattcagttcctatttagaatgaacagatttggggcatttaaaaatagtgcccttgacttgttagtccctttaacttgaggaacattctaccagtatgtggtattctaagctttcacaagcgcttgaatttccatagcacctttttgttttgttgtgtgcttagcaaaattattcttagtcatgacttaatggccacttccagtccatcagcatggttcctcccaatttacagatgagacaacttagaaacctgacacctaactaggaaggccttgcctgcagtgcactcatgtaagtgccaatgagtgtttatgaatttgctcttcttctgagcatgcagaactcatggctcagcacacaaaaatggcattcctggctatccacgggcaccttggacatgagtggctactggtcatggtgatgtggtcacctgacaaatcttacccacagacgagaattgacctctactgtaactaggaaaggtggcaagccatggggcttctgcatgcactgaagtaaagatggtcagtccagcagcttaaatggtcttaatgatcagttggcagcgtattccagtgtgctgggggcacttcctccttgcccaaagagctggtgatgttcaaaagcagaagtagctttattgagatgctgctattatcttgccacagaaatgcatgctgtttggcggtgcacttcccaacacaattttctctcagcaatattctgccatctctgtggggcttgtcacctcaccaccatttctgagagcgtaatggcaagcaaattcagatgacaataatagaaggcattacggtgaatttggggatggaaagagtgcaagaaccctaggtgtttgacagagcacttaacccacctaacgggctgagtggagccaagctctcccttcaaggacttaagtaggactaagcagtcaggagagcagaggaagcccgtcctgacaactctcgagtgtagacatcacagtcatgctcatgtggtagacgcagccacaacttttacttgcatatcccttccatttttgccccccatctcccatgaggctcccatggtaggaggaagggcttctccctttagtggtcctcggggctcctgctgtagagctgcattagtttctgtcatcggaagctggaagctgacatccgtggtcacttaccttccagactgtctggtttttctgtccttgccaagatgcatttacacattaacagtttttatttatttttaatttaacctttacacagtagcaaactgttgtgtgggtgggtttaagtttagctgtgtaggtagcatggtgctgatggggctgcctgctgtcgaggagactgtgggctcttcctttcctatctcctgcgcgctctctctctctctctctctctctctctctctctctctctccctccctccctccctctctctctctctttctctgcctctctctctctctctnnnnnnnnnnnnnnnnnnnnccctccctctctccctcccttccttggcctctctctctctctctctccctccccccccccttttcccttcactcatccaacgccctgtgattaaatttttagtacacttggatcattttgaacttttaagcaatttctgagagaacaaaacaaagaggatttttatggcaaactccattaatgccacattaaggctgacattttaattacccccaagtcaggaaatgcaaagttcaggttcccacagcaacagaaactgtccccttgagtgccgagtgcagcatcctagcccatgcttacacaacaccggcatgaggacatatgtggagaggagcagcctttatcctttgtgtctcttcagtaaccacagttgaggacatgagcctttagcacccctccccaaaccatctctatgtattatcctacatgctctacatgtgcacacagacaggattaaagttgctgtggggacattaactctggtttccggacttccgtgccagtcacatttagaccataatgttgtaatttttggcatgtaataaatgtgcatttcatgtacacagacagaaagaagcataaaatgtattttaaagagcaattaattactaactttgtgattaaaaaacatttggtgcatgttccttcccatttagcatcagctgctggtcttagccaggcctaatagatgacatactgtgtcccatcctggatctcagatgtacttactgtatgttcctgttcctctagataattaattccttagtaacgctgtagggggaaaacaaaatggaaggaatatgcacgcatgtaaatagggtaagggagactctgaaggaaatgattcattcctgcaaataaacctctgagtccctgataaagagccagaaatctgctaagtgggtggagacaaaggtttctggccaccttggagcatctggtcctgggccgtagaacaacttaaaagcagatttttccccccatgaattccaggcttggccagtggaggagtgatttcctaactctttaggcttcagaaattaaaggttagtttattttctaatgactggcatctgttttcaaactgggggggggggggggggggttaagggcaggcagttgtaaagagttcaggtaaaaggtgggctttgcaaaagaactcctcacgcagcagacatagtttttcctcccgctacacattactctggttgacccatttgtgttaggaagggcatgtctcaaaataactgaacaggtttctgagtaaacagaattatttgcaatacattatggcaaaatgtttggaaatgcaagggcttgggtgtgcagtgaaaatcaggagacataaaaactgccctggaaaggtatgtggtggcttaaggcccagcacagcctccagcagggcatgctcagtgaggcccctcctgctatttgctcattgttccctgtcatgcattcccttttgctcagtttggttgcatatggtatttaacctttaagaaagaaacttcagtcttccagagctctgacttgctgtacttgggctgtctctaagtgtgaatgtatgtctgtgtgagtgagaactgctcaaggagtttgaaggcctctctggcaaatttgactgcgtgttcagaaagtttccaatcggaaagctgattcagtataaaaccttccaaaaacttcctgaggcacctgttcacatggaaagattgggtttctgttggaggtgctcagaaagcgatgtttgtaactgaagatctctgtttggtgtgccagaaaaatgaaaaacattttggccccagaaaacctctataaatgttcaaaatgtataatcaaacaaagacttcatttggattccgatgcatgtatctcagcagatgtgtctaaactaactggaatcccacaggggcagctgaactggattttggtatgtcttgataactgaaagagttattcttagaccttgcaaggacaaaaatggtccatctgtgaagaaccgtaatagagacatggcaaaaaacagcatcctctgaaagagttatttatggaatttaggacaagttggacaatcctgaaaacattttggggtcacactaatttgcaggagaaatgcggccaaaatggaaagaggggtaacaagcacagatagttactatcctatggcctggataatttattttctgataaatcatatatcaattaagtagtaaatagggcatctgtactgtaccaggagctgtggctgcctccagaacacccgagttctttctcttccgagtgctacgaggagctgagcatttaccttcgtttcattcctaaccgtgtaaactgagttcctgccattccattagctgaatatacgtgggtttcgtttctttagaagaggctttccctttttgaagaagtaagtaaactgtgagctggttaacaagtgctatctttagagttgttgttatggcctgttacacacctcttattcaggggtctgagtggtgcagagtgcacctcacaggttagaaagccagttggttttgtttgctactgcagcagctgctgctgctgctgctaatgctgctgctgctgctgctgctggtggtggtgtcttttttcttgctctgattttctagagtttgtatttattgtgtttaaggtcatactttttctttttaattacatctttgtagtctcttttcttccattcactgaatgtggcacctggtccaagtctgcttccgagagagcttactgtgaagggcagactcaggactgctcaccagtcggtgactgagtgttctgaaggcagagggcctcaggccaggtgttccgcaggacagtgtctaacaagcttctccagggcttggagacttggagtcttgtaatggagaggaattaccatgagaaaggacggctgcctgacagggtggttcaaaattcatcctcgcaccaagacctcggcatccatgcacttgttcaggccttacatgtagagtacatgtatgttgtgtattcatgtggagttttactgagttccatgagtacccaaaaatgaaaactagcagagccaagaaccttaatatttagtctatgtcttcaagccaccattatcttagaactcagaatggttatgaaatacactattattcattaacatctcattaagtttattgaagaagttccaattgacctcttttgaaaggtgaacataatttcattgaatatggggcattagggtaaagaatgacaggtttgcacccgagttcaaaactacaaaaccctcaggaagggtttttaagggacttttcaccatcaaagctctgtgtagataagatctaatttagcagccagtatgtggatcgtgcagggatgggaggagccaactggaagaggagagcgcccaagagacattatcagtagctcacactttagtgacctgaagggagctggagataggagtagagacctggggaggtagattcatagactgagatgaggctgagaagggaacttctcagagaggactccaacaaggtagcaaaaccgaagatttagggatttgggcctagtggaaaaggcctacaatccaagctactccgtaaatacaggagtaaacttcaaagaagacttcgttgaaagaaaaaaggggaaatagaacctgaggaatgtttacactgagtgataagaagagaacaaagaatcttcaaaggagacaaacaaaaaagatctgaggagaaggccaggagagtgaggggcataagggagggaacgagtgagctacagaccacagagaacagacagtgcaaagatcacctcaggctttggaacttgcctgtcatgagagcagaatcagcctccccactctctttctctcacacacacccttccatgcagaggagttcggggacaaaggagataagtggtaaatgaaagaatgttaaagaactgcaaaggtgggatccggagtatccttacgaggccagagtttcagaaaacaaaaatcaagaagcacataggaaggaggactcctccatggaaggaccagtgagagggaactagatccatccatagtgcagatgtgagtgcacagcccagtgaggcagtgaacacacctgccctttccccaccgctttctttcctttctgctgaatgaaaactaatgttttctaagagttgtaggatgtcttctgtggaagacttcacctatacccacttcatctgaacatttagctgaggacaagtatcagataccagaagtattcaaattcctttaaagtgaattcctctcctgagggagcctgtacaaatggccacatagttaccagtaatagcacacactcttctggatcaagcatcatgagcatccccagcttcatttggggcaaggagtttaaaccctgtgtgctaagacaccacgttaggaatttcaagatgtgattaccagattaacctccctatgtttctgttcccagcacacatactgggcagctcacaaacttctgtagcttcaggtacagtgggacccgtcaccccatttggctccaacaggctcccaaatacacacacacacacacacacacagagagagagagagagagagagagagagagagagagagagagagtattgataaatgttctccagcacacctgcctcctataagcactttcggcaaggatatttctggccccctcccactggaaagaaaaaattagatgcaaaggccttagaccccactgttccagaaagtgaagctctcttaggtctgtgagctccctgagaagagaacgcatgcacatggggtcagagaattcagagaaggaaagagcagtgtgtccagatcatatcccaatcagtatctgtctccttgaacctttgctccaagagttaagtcaaatgcaagaagtcctatgcgaacattcaaatctagcatgactcctgataaagggtgaggaaggtctggtaacagacactacagcagtggttcctacctgcctaacactgccaccctttaatacagtttctcatgttgtggtgacccccaaccataaaatttttgttgctgctgcttcatagctgtaattttgcctctgttaggaatcagaatataaatatttgatattcaggctatttgatatgtgatccccaaatgggttgagaaccccaggatgagaacagctatttcttgggtgtgttatttgtgggctaagattgagatcatgtgttgttcaggaagagatttctcaacgccatggtctagttatacatggactttagtctatgaatgcagtttaacacacttctaattaccgtcctctattgtgatttccttgtatgcatggcatctacacattcataatatacatgtcccatgggctattgtgcagacagattaggtgcagggttgtatggaaagctccaaaactgcacccgcaccagtggctttgaccttcagctagtacctcttcctcttcctcttcctcttccttagcttcagttgcttccacttttattattcttgtattttttaagcagcgtctcatggtccaggctagacttgaaccttggatctttctgcctcctcctctggagtgtgaggattacaggcaggtggcactgccatgcttagtgtccatttgggtgttttagattatgaagaaaatgtcgacttgaattaaagcaacctaaatgacagttgtatcagggcccaaacttcctgagagccactgaaactcaaaaacctcagtctgtagaagaaatggcttcaagtgccccttctggactcaggtctctgtgggtcaggaagtctctccactaatcttctggtggttgttttgacctctaaaaaaacaaataaacaaacaaacatacaaacaaaacacctctacatttgttgatttactttacttaaaatggaaaaggactaatatttaataagtacccagtctatgtcaagtacactgtcagcatccttataaaacaccacatatcatagataaagaaattatctggtactcagaaaagtttaaaacaaaaaagccttccaaatgtcttttttcttggtgtgagaaagctttaaaaaataatatgataatgttgaatgataacattacccaactgagttcctggtgctcacctgcattcggatcagtgagagagtttcaaataatgggaaatggaatggagaggtttactctctccctcagatgccagcctgcacacaccccgtgtaagcttcccatggccagattcatgaagatatcatagatcaaaccttaaaacaggcagaccattgttctgccatatcacagagccttctgcagagagaaatccaagcaaaaatgtgcgtgtatacacatatgtatgtatgtatgtatacatgtattatgtatgtatatgtatgtatgtacacatacatacatatatatctttaaaagacagtcttcctgatgactttagagtattttgagatcattcaaaatcaggtgcagttagaaaaagtaaatgtgtttgatgaaaatgagaattattctcagttacctggcttgggtaccattttcatttctgaaacagtttgcaatagttaggaggaaaataaaacctgaagaataaattcaatgaggcttgctgactttgtccctgcttcctgtcctgtggtacccacatagtttggggcagtatgtggagaggttttagacatttgcttctctttcttcctgagtgtttctgctggtgggtgtagaattgcaaggacacacatggaggaacttgatcttcaaatcttccagtaatagctgcagattgaaagccaaagcagattatgtgcaagtctgtatacatcccaagtcagagctttaaaatgataacttactgagtcatgagttctgcatcttgcatgcagaatttcttaaatcacatgttgatggctaatcagcagaatccaaagacgcaaattagatggtacaatatttacagagaaaatatatgtgtagctcacagagtaacgatcctcacagttaccatcccacccaaaagggggaaaaaaaaaaaaaaaaaaaaaagaagaggcagcagcagcattgcaatctgaactctcagtattgtagccaagaagggagcccgtctaacagtagaaggaactgaagacagaatatttttggtagcaggggtccaaaccctctgaagagtcagaagcagcactgcaaggtgaaccatttctgttattcaaataacatagccagtatatgtgtgtgtcatataacttttaatattaataatatattcttatataatatataactctcaaataatcttagaaatatatatggatgcatatatatatatatatactttaaaaatatttgagagcttcatatgtgtatataatgaattttagtcatttcacacatgcacacacccattaccttcccatccttttccttctccctctgaaactgttcaatcccagcaatgcccccctccctccttaatgtcttttgtgtgtagttatgactctgtaagtttagttacagtttcttgtatgggcaatggtgacaggttatgtcatggagccctggtcagcattaattatcagtagttccttagggaatcatggagtctcatgagcccctcctctgaccatgaagagatattgaggcacgcactcttgtacaggactgatgtggatacctgttgttgcagtgatatgtcatctctagaatacctcttttgcgacacaccttccagtcctcttccctttgatgatgttctctgagtcttgaagagggcggtagatgtcccattgaagtctcagctctcttgtgtctgcttaaccactgcctactgcaaaacaaatctccctgatgaaggcagccctgatctgtgtgtgtaaacatgactgtttagaaggcagtttgaccacatgtccatttatccgagtgatgggagtgtgtttccctaggaccgatggtctcccagccacaagctttggacaaggtttactgtatcagaatgagctccctccttggagcaggcctaaactccagtcagaaaggggttagccataacatccatgctctggcagctttaaaaaaagcattacatgtgaggaggggacacacacatactccacagcatgtgtgtagaagccagggataacttactcgttcttttcttccatcgtatagaggcatgggttggactcaggtcatcagctggagtagcaagtatctccatccactgatccatctcaaaggctccttgccagttcttgtaactccttattttaataatttattatttacttattcatacattcatttttgtcattctgggaagcggacctgttgccccacacttgctaggcagttgctgtgccgctgaatggtcagccccagctaaaatgttgaatgcctgttttatccaggcaaactctgctgttgtccatttcctcatctcttggatccagtaaagtgcttagccatagtaggtgttcagccagtgtttgcagaatggatgactgaaggagatagggcagctcagggaactgtactactgagcatattgcagggttataatattgaattgaatttttccactcagcagacctacataacaaagtgcatcccagataccctcaggtttgtatgctgggaaaacagagtgctttctcttgatcatagaccgctacatgttttgattttaatagcaatatggcagggttaaggtcaactttgtaatataatctggtgcctgtttgttcatagatatgaaaatagatgttcttcacaagatgctcaaacagatgattgggtgaaagctctagaaaaccttgcaataactaaaaggaaagatctcccacttctgctttccatcactgtcaaatggggtacagttttgtgcagccccaaccattctttcttgtctcatcatcttcccaggtccagtctttgtctggcgaaggcagcatatgactgttagtatagcaaggagatggttcttgagaaatccagcccccacacacaatgctccagagctcctcccctgggaatggcatgattggatccgcagcaggcagagctggcccagggaaataagagcttggcatagaatcttagggccctcctgctggaggggccctcaagagagttgcttcacacccaccctccttcaactggctggacagtagaaagatgtgtaagaaaacaaattcctggctgaatgaatagaggattaagtgaacgagagatgagtcccctgttccagaagtctctgccatcccacttgaatagaaaggctaactttgaagccactctgttctccatggcatgattttgtatatactcagctttggaatatggttgccatctgctgccagtacataagactaaggaagtattggggtgggtaggaggaggctgggaggaaagaaagagacacttaaatgagctaatgatctgctttgtgttggagtctaggtttcagaacatcagttccgtactgtaagaacaaaacaccagtgtgtcttaggccacaccaggcgccggcacatcagataaggcccatgctgtgtagtgttcagccactgagcctcaagaagttttgaaagtgaaattagaggagcaaaccaaggaagccaaagtgggaaagctcttagggtaaaatatgatcagaaggactctgcagatatgtgccttcgaggttacagtagttcaaacatgactctactaattaaagacttggaaaatagtctcaatcctaggaacttaaagatctttaaactaaagtggagacttctccatctactgcaaaggcattgtgaagcttttgtacagtcacaggatgagagtgacccagctattgtgcattgttgtgcacttaactattgattaagagccatagattgctgtcctggcagcaggagtgggtggtcttttacaagcaaaaaccctggtaagcaaagccagcaaaggcaagaccatctatctctgaaaagcagtgaatagctcagagagcttcctctttccctgatattatctgtataaattaccagttatggcacaggatcatgttgataatttatataccaaaatgacatgccaaagaataataattaagcagagatgtacactagtgaaaaaattatcccagcgaagtttacttttgagaaagattagctaattagccaagtatgacatttgaaggcaagtccccttctactcttaatagtagctctgtctccactttgaggagttagcaggattgtagggcagaaatattttctggcgtgaaaaggaaagaattccttcattactataagcaaagtgaggagacagggagagttgtggaaaagcagaaaatcagatcagcacgcatagaaagtggttgcaagagcatgtcgacctcagagccctagaatgaccaagccaggaaatatttgttggctgtacaagctttggccttgattcgtatctgccatcagagcgaagtcatccacagctgtgatgcaaccacagaatgttattaatgtcctcagcccctctcatatgcagtctctcatcccaggagcccagtgtgccttaggactctgcttggcttctcccaagacaaccccatggagcataaacgtcttcatttataaatgaaataactggtccacaaaggcccgactctgttctctggcttcaaatgtgaaatgattaatagtcatgatgctgacccagcacgttgtgctattttttacattattttgggcttctcagacaaaggacatattttatctttctcattattatttttaattacttttcagaaaagtcaagataaaaaaaagaagaagaatctaacaaatatcccatagagatatttggtattttctctctctctttttgagaataaattaagatcttctctgcttctctatgctggatctctgcagatagtcacagtctcatgccagttttcagaggaataagggctcattctaatggctgcatcacagtcccttctgtgaagaaacagccttttaaattcctgtctggacactgaataacttgtttttggtttaaaaacttttaacagtttgacctgaaaacttttaaacattactaatatacaacctggttgtgagtttagcaataaatttagacccagtatgtgaaaagccaaagagaagactagtggcttttattctccctggtgacctgcactaaatgttgcatatttactttgtaaatgaggacacccagtggccagcaagtgaaaatattctaaacaatccccgacactgttaacataaatataaagagctgttgtcagcacccattgatagatagcttctagcatctactaccaagcactggtttccctgggtcaggcaagagtggagcctgataattttctacctcactttccagactaggtgtctctttccctttcatataaacgtggctcgccatctttggcatccactgaatcgtcagtggcagaagggcctagtagaatatttcttaggacagatgaagtcaggaagttgagaataacttaacagagatcagaaataataaacagatgagtgtggtttaaaagaagtgaggtaagttcataaaccataagttcatggtgaagacagagccatggttattaactaatgagagagtaaggaaattaaaaacaaaacccaagaggaagaacagatgtgggccaccagggactagaaggacctcctggaacaacgggtaggctcacctcagagcaaatgagccctgagctccacttattctcagcagtgtctgtacagtgtctgttatggagaagtaaccaaagagaacacctacccctttgggggaatgtgtgggacagtgtcagggatccagttagcaacctgtgttctttcagttacagttagagttgtacttgtatttgcagtaggtaaggtagagctgtcttatggctgtaagacaggcacaagggaaaatggggaaggcattaacttactgtcattataaactatctagtatgtgtgtaaagtacagctatattcttaaacattcaaatatgtgaaccatttccttgtttttcttaagaaaattaaacctaagactcctgggtgaccagtttatatagaaacctaatgaagtctcaagactgtcttcccctccccagatttgtacaagacatgggaaatctagggaaggggtcacatccttggtccatagtgagctttgtagttggcattgcttgactctctgatccttttggcttctaggaactactccactctctgtggttatagatgccctcaacatggagcctgagtccctcggatcactctttctctcagaacagttagtgtccctttatgtctagccccccaaaatatgcaaagacattttccacaaaggcttatgtgcaagttgacttgtttcagttctcttttgttttgtctgtgagagcctttgctgagatagggtcttaccacataccttggactgacaagtctcccacctcagcctccaggatgctgtgaccacagaaatgagccatcgcttgcttacctttaatattttaaaggaagatgatgatttttcttctcagtaatattacctcaatctgacttcaaagcatcagactccccccttcatatcctagaaagagtcctaattagttccctttagaagaccaaattgagaatgaaaacccttccttgtagggattaataaactctgaaaccacagctcttttggatgagggagcccatgtccatatacaaacactcaatgcttctgatctacaggaggaggagaaatgggactctcttataaacgccttctcattctataacaacaaacgaaaatttaataattctacttatacctccaaaccagtggaaagcaggaaaaggaagaactcagcataaaccctagtaatcatgtgaagtgtcccagagaaaggagagttgtaaataagtttcagggaaggtttgtaaggtttggtgagtggaaaagcccagtgacttgagaacttttgtaagatgagcagaaggagagaatgtggagtgagtgcagtcgggagaccatggcacagtggtacttagctggtctagcacgccctagactccaccaacagcaagcttccatcctagcccccaagtgagtaatgaataccatataggtggaaatctgcaaaatgaccaggctcttgaatcagttcaaagattctgtttgagaatacaatgagaatcaaattaaaccaacctgacagacatgagacaagactgtaagaacacaggtaaggcgtcatagagctcggtccttctactccaatccatgaatactattgtaaatattatagcactacagaacagggtatggagatagaataatattaaagcaaacttctccttatgagcacaactgtgaagtgtgctttctgctccatttggtcagcagcgcttcctggagcttttgaactctgtcaacacttctgcactagcttagcatcatcttcttagcacaagaaaggaacctacctgttcgttttaattttattttagatttttacatttgaagacacttgttccatactccatacataatctaatatactcattagattttgttactgaacaagatatggccatttaaatgcaagtctataatgtgcatgaagctgattctataatgggtcaccacaagtgggcatctgagttgtagctacttactgtcttaaggtggcctacacaaaaatcacctctgagctgccatttgaccattaatctagcaaagcattggggaaggaggcctgtactgtttagtaggggaatgcatagatagcaactgcagtccccagcttccatagggaaagagcccacctcctgctgcccacagtgctgccttggattctcatggtcatgttggagctaacattgtgttcagaagacacagcagagcaatctgagcgtgaatctgaagttctgctttagaaacattcagaacaaaatcgcaacagagtttggaagaaatcaatatcttggaagctgtgtgataatttcattgggaaagattatttacctggcaccacaagatcttatatctcactcactgaaagctagattaagggtttcctaactcacaaattaatttctgcaactcttaccagttgatattttctgaaagaatggtattctagaagactgcagtgtctcattacagtcactgaagtgaggattctatctttcctgtttaaaaaaaaaagagagagagagagagtgcatgttgatgtggaactgaaaaggagagcaaatgagtaagatgtgctagcttctatataaacacattttaaaatttgaatttctttcccagaaaaaagaaagacaacttctcaacgacactgactatctaggtccctctttaaggcctttccaaatccaagctcagactggagaactgtgaaaatttcagtacattcttcggctcagctttttatcccgcccacggatacagtatctctgtatttttgttctccagatttagtgaacaatgagaaaggttacaatagggcagcagctaaatttgtaaggaaagagctttagggggaaatgcaattcctgaaaggcgcttcaaaggtttctagtgtgagaggatttaaagacatcaaccttagcctccattgacttttctcctggtcccagcacggcttccctcctcaagaagccattttatttcaagtctgggcagagagcataggtgttcttcagcatgtctggaattttctgctcatgcttttattctgagaattaaaatataagcttccacaaatacacagcaagacagttagtatccacgttttagtccaccagaatcagaagctcaaagcagaggtccatcctgctcgttgattctactaagggttatcttgactgcgtgaaggactgcccagaaacccacgaagtattatcttaggtatggtggcaagtgtacttccagaggagctcagcatgtgagtgtgagtggacgaggtggggatagttctcccccagtgatggtgcgtccttaggcatccccacctgagagctaggtagggcttgcttctgctttggatatcagaactgtaagcttccttgagtttgtattccaggcttataccagtggcacaagcgtgcatgctagttctgaggccttcagactcacactaagccatactcggagaatcccaatgtcttcagcctagagatgatctgtcaagactactcatctgtcctaattcatgagccaattccttgaataaatcccctctcatatgtctattgcatatcctattgattctctccctctaaataactccaactaatacaaattttggtatcaagagtgactctagaggaactgaattttttttaggaactgaatcttaaggatgatttgtgtaactgattttaaggattctagaactgactatctgattaaactacaaattcctaagggttctagttagtacagagagcaccaagagactgtggcatgagttgtagggaacgcaatatttgatacccctggctcactactcattagaagcaaggagtttagtgactctgtctattgtactttcagtctggagaaccaagaaatgtgatgctgatcagttacaaatcttcaggaatgagatgtcttggctcgagctccacataacttactgaagtgtatctgaactcaaaatgtctctcctacatttccaataggcaaactgctgataataaagcatgccctcgtcattcagttggctgaactctaacagactttgaacccagccttttgtggtgatagcacactgttaaagtgaggacattagttgaaaggtatgaggtggagataaggagaaggaacgaggggatccttagcgttagattgaaatgtgtgtgaagactaatgaggctggggacacagagctcctaagctctgaggagacacgtttgccagtgggcatgccctctctccatgttctctccccatcctgtgccctacaacagagtggcctctacccactgccctatggcacggcagctggtccctcccacccctgcagatggctactcacccacacaaggattggcttttccctatctgcctgcaggcattggctggcatcattgccaatgaaaacatcagtgatctctcctgagaagccccgagcaggagaatgctgcttctcctcaggcctggccttcttggtttccaccctgagatctaaattcaagtcagatcagaattcctaaagtgcagaacaaaatgtcaccctgaggtgtactgcaacacaggaatcatgagatgcctgctttatgcaggcaggagtctggagaaatctcgtgtgggaaacatgagaggccaggctaagtaaaggggaaatgaacttatagcagcctgaatgtgtttttttaattgagatttttttacaggttgtgttaaggatccatacacagacatttcagtttgtacacaattcttaacatatgaaaaaggtctaaaagtgacatgttgtgattcttaatagcataccttccagtgacttttcaacttcaaatgtggaggcaaattttctacaaggagatatgaaataccaacacattcacatgctaatttaccatcacagaagacccgcccaggtctctggtttctaccacacacactgtacccacaaatttcccttctcagcacattaacaacgttatcaagaaaaggagacagccattccaagggtgctgcacagtacacacatgtctgacaagacaatagtatattccagacatgttcaacatacaactgtgactccaagtttccatttcatatgttttatattataggatataaaattaatttacctatatgatgttaagcttataaccaagacagtcataggcttccctaattaaatggcccactattttctggttatataaaaaataagcaacaaccagaaaatggttttgcagcttcctgcttctttccctcctcctccaccatccactctgagtaggtaaatccattttactatgccaggctccctactccttcgcactgattccttggcactctgtattgctcatattggtcctcttctgatccatgctgcagccaacaaatttaaggttagtggattttcttaatgctttaagctgtaagatgaagtgtggttccagcacactaggcttgatttcttttacctacttaagaatggacaaaatggtttccttcaatcttaaagatattcttaggatcatgaagactaactcgggattgcagttatacagaaagcataactctggtgctgagacatggtgtttatgtgtagacctaacgttctgagttctgtccaacatcccatttggtagcaggagaaccgactcccaagagttgtccctctgatctccgcacatgctctgagtcacaaatgcctgcacacagaaacacaccacagatggatggatggacgggcagacagacagatgaatggacgggcagaaaggcagacagaccgatgaaaagatcttttaaatatgtttgggttatacaagaagggagggaagaacagtgaggcattcgtagagttagcttttgtcttccacggtaggctgtactcttcctttttaacttctccattttgtgcagataaatgatggggttcttgatgagcagcttgggacatttttcatttttccctttgtttctgggttctcttttgtttgtaccctcccccctccccatctccaagatggagtatctttatatagtagccctcattgtcctagaaccagctttgtagaccagactggcctcaaactcacagagatctacctacctctccctcctgagccctgggattaaaggcatcttccatcacagcctggcttgtttccccttttttttaatttggaggtttgttctttccctttaagttttttttagctttcagctcttacagtagtaggctcagctgacagtctcctctggggcttttccttcacggaacccagctgggttgtctttctttgtggatgtttcagcagcagaaagcctgtgagctgggtaccagaaggctgtggcacgctgagagctctcaccaagccatgctgcctgactgctacagactaaaaccatcagtatgggcccattgagcagaggtggtacatttcctgtttgggtttttttggctgcagtgtgcatcaaaagggagtcaacatggctgaagtggaaatgccccaggaaggactgcaaaggcttggggatattggaatggtagagtggatttgcctaactcttcctcatgggagagccagaggtaggcccttccccaaccagttcttcaaatgagtaattaaaggggcaacccagggcctttgaggagctctgtgatgatgctttgctgtagccctaccttagagaggaaatccctgccactcaagtagaaaatgtaaatgcaatgagaactggatctgggaatacaaggaccaagcagtggccttccactgtcggatacaaggtgggtaattacagtagtagatagacatacagagcaacaagcaacattgtgtaaataatgtagatccattaccttgcctacttaatcccagagtctgtaggacaacaggaaacctacccaacccttctgtgacctatataaactggaaacttttggagaaagtgaagaaaacttgaactcacgccctacagacagaatcacagctctgagtcagtttccagagctgagttgaaagaatgcaagactgagccactactacctaaatgatgtcctgttcatcttgtccttctccaaagggactggcagccctttaccaggacacctgtgcatggggaaagaaagagtcacaccttataaggatgagtagaaatgtgctctacacactgattcaggagagtacagtatctcttcagctacccagtcagagtaaggccttacaaagatctggtgataaatggggtttgtggctctagtctgattcatggttggttctcagatctatcttacgtgtctttctccagttctggaatgcgtgattatgacagggatacttagcacctggccaaatgggcaggtcagagctgccttttcctaggaacatgatagataaaattagtatgtccccagagggtttataaagactaatcccaccatcaaggacttgcaagatgccagtatgtggattctcactcagcttttttatttggcctgtgcaaaagacagatggattttggagaatgttaatagattattaaaagtttagccaagtgatgacttcagttgattaatttacaagatgtagtttcattgtttgagcaaatcaacatgtgccctggtactttataaacagctaatgatctggcaagtccccttttctccataagacgaatggctaggccagcagtatatttatactgcagttcctacctcaagagagtatcagcttcctagcccagcaccatagttgaatttccaaggatcttgatcccatttcctttcagagctataccactgctccttcacactgatggcatttggctgactgggcatggcgaatgtaaagtgtcaaggactgtggacatgttaacacgcaaattattgtcaaagggtgggaagtgaagttcagggccttgtacctcagagaaatttctagggctctatgctgtgggacatgttaagatcccttctaaggtaaagggtgagatgacacaactggtatttcctggaaccaaagggaaaaggaaaatagtacagggtctgtttgggtttgccttggaaacacatcctaaagcccaaggaagttacacagaggagaaaccttcctgctcctcgtcgtagtctccctcagcctatatctctgattcatagagaataccctctcctgggtccctggacactcagcctcaacctcagagtcacaccatgggtttatcggattctcaggctttcagactcagactgagctgtgtcaccaagatcctggtgtccccagcctgagatgacctctcgcagaacttctcaacctccataattgcatgagacaatttccacagtaaatgccctttcatatgtctatactaatattctcctgattctgtatctctgggaagtccagatatgcacacagatgatgtcgttatactaaaactgagtttttagtttatgtttacaattggttccctaagttgttgattaattacttttagactgatgtttgatcatactttgctgcgacctaaaaggatttaggttgatgttaacaattcagtaattattaagacatgtttttatataacggcagacaaacgaggaatcagagtcaaggtaaagtaagttattgtttattattattatgtaataagtctagatgaatttgtaagtaggaaagcacatattgaagtctactcagcttctgtaatgtggcccaaatcttgactccgggctcctttttctaagcagagccaggagagcacgatctttttttttttttataccatcagatttcagcaagagcagagcacagtactgttgccacaacctgctaagggggtctaagttgattagttaatatggttcaaatagtgaaagtctctttggatgaatttgctttagatttcagctcattcacatttacactagggaattctcagtaaatatttcactaatgatctagtgaaaatccaagcaaccccccagcagctttatccataactcagttatgtttataattttagcatgaagccagcaaagcttccttccctcttgggatcacagcagtcttggtttgaagtaggcaagccagagagacctgagctaagtgaaagccaatgagagacccatccgcaaagctcccagggcctaagactccaacagtgatagaaagccaccttcagccttcagacagactagaaaggaaattagactagaaatggaaaaagaaattagaagtgaaacgtttgtctagagttaggggtggcgttagtgtcatagaacaagtgggttttccccagttttacttccctgttgcccatacataagccttagtaagaagagaatggtgaggatggaaaccgaggaggaaaaggggaagagggaggagaaggagagaaaggggagaagagactagagaagagagggagggatggaagagagtggcacagagaacagggcagtggggaaaagagcacaaggggaggaggaaggaagggagggagggaggaaggaaggaaggaaggaaggaaggaaggaaggaaggaaggaaggaagaaaggaggaaaaagagggaagggcagaaaagagggggattatagtgccttcaactgaacctattccacacttcattttgttgcgtgaattggaagtgtatattggatttgctttatccttgtactataatatctcatttcaacattcaaaaaatagtcaccattccctaattcttccataaatttctaataactgtcaaatgaaatgtgctctgctaaaaaccaaaatcaaatcaaaccttactcagcgattgccttcaacagttggaaacaacctccccaacttccacagcttcattctaaccagcttcagttaaccttatccacattcctctttgagtcttactgttactgttagccatccttttctaaaagataactttttattgaagattgtttatcttaccatagaaaacattaccagctccaggctgggggaagatcaagcacttgccacacaaacgtaaaggccttggagcaaattcccagaagcaaagtaaagccttgggcagctgcctggggtgtaaggtgtaagcagcgttactgagaggactaaaaggaccatggtgcttgaggctggactgtggagcctggcccctaagctgtgccagtccaagtactgagtaaccgacctcctccgagccctacttttgatttagacctgttggcttgatcaacacttggtttaatttgagcactggtatttccttctttctccagccgtgcctttcccatccccctccccccacccctaccccacccctcccctgcacctcacccttcccctcctctgttttatgtatgcctttgctctcctgcctgagaaagaactggatttcacacctaattaaaaaagattgtattgcctgctgttccctttcttctccgttttctctgattctcaggcagcttttcattctcatgctaagtcctacccctggacccctgcagcttacaggacaggcaggggcaaagttcctataaaaccagcaccgagccctcgaccgccaggcagatttcccctcggggactcagccctgcctctgcatcatcatttgtgttcagggaacagtcactcggaataattacatcctcacggtccttaggacaatttcttgaatgttcccagggagtgtcatcacagactgactttttttactctagtacaaagccaggtgggtaggatattcttttaagaaaatatgaagagatctatttttaataacagttttctcatgccactatgggctttcttacagcgagcgatgtggcattttcaaatacacaaaaatctacgtaaagttctatagtttttgaagagttggggtttcctggggagggaggttagttggtttgggggtgtctggggtttttttcttgcttattttgaatagcccagatgcctattcagtgccaatcttagaaagaatggacttagcattttcacaccattccttcctatacagttcttgaataccatctaatcaagatttgttttcaatgggggacaaatctacagtaggctatttcaaatgtattccattggaatctatacattaatgcccactggatgaaaaggacatgttcacaaaagcctggactttgcctcactgtggcagaaactttcccactgtatttgagttaaaaataaaagcaagcctgggaaaggaattgcctctgcattgtgtgctggaggaaggaggcatgcctgaatggagaggcaaagtttctccatcgcatctgtaccaccaccagcgaaagagaagccagcctttcatggcagctcactgaagtgggggccaagtgtactcagggagatgtttagagtcttgtccatacaaatccagatggccgataaggtcggcttgtatctgcacatgggtttacatttgcctctctggtgttcagtgaaactgatgacaatgataatattagactcatatagactatttagaaaataacctggctgtttagattggctaaatcttcagtcaaacaagcagatttttctcatgaagttgtttttatgcatgtgcatgcatgcatgtgtgaatatgtaagataaaataggtttttaatactattttaatatctctctctctctctctctatctctctctctctctctctttctctctttctcttaaatgagaataaggaaggtccaagatccttggtaattaaagtgccactcctcagagcaccaagaaatgtggattctaatcccaactctgctagtttcttgctgtatagaactttgatgaaatcaggtagaaacttttagaaccacaacattcccttacctcaaacagaaacaacaacctctacctgtgtagaaagagaagtgtgctaataaggagcccaccctgcccagagatggtgattttcctcccatctgtatgtagctatttaactatgctgcttgatatctgttgcatgctctcacatgcatgtatatatgtttaagctacagtgaagtctgaaggcctagaagccaaacgctggaagtgatctttttaacttttaacttgagagctgatggttggagcagctgtatggacccttgatgccagctcccatcgagagacaaagcatgtgatgtcgtggtggaactgtcaagagagcaatccagacccacaccacttgggttcatataccagcgctaccactatctaccagtgtagctttgagcacattgcgtgatttctcagcctggtgtataagtgaggatagtaatacaacctgttccccatggttactaaatggtataatatgcatagagtggtttggacagtgtttgacagataataaggcttgaagaaaagtttgcccttatcgttttccttctataaatgcatatatctagaatataaaattcagcaagatgctagaacatgatctactgactcaattcctggacagccattcctgaattattagtatcttcatttaaggatatattttgtaataatatatatgtatatatgcaactagaattttatgattacatgaaaaatacagtataatacagtatttcaggtacataataagtctgatggaaggtgaaagaggttgcatcactgaatgatacaagagcttagagcatttgttatgcttggagggtcacgagaggggtcatgtagaaagtggggtagagcagggactttttgagcaggcccttgttctaaagcagaggagaaaggagcatagaggcagactcacctgctgtgcactcaccaggtcctctggggttgctcactacaaaacagagacctaagttacaactgatgttctagaatgtactgtgcgggccactttgttcacctgatagctatgtattcataattttctcaccatttgtattagtcagggttctctagagtcacagaccttatggatagtctctagatagtaaaggaatctattgatgacttactgtcggcagcccaattcccaacaatggttcagtcgtagctgtgaatgaagtccaagaatctagcagttactcaggctcacacagcaagcaggcaaaggagcaagagccagactcccttcttccaatgtccttatattgtctccagcagaaggtgtagcccagattaaaggtgtgttccaccacacctttaatcccagatgaaaggtgtagcccagattaaaggtgtgttccttgaactccgagatttaatcttctggaatccatagccactatggctcaagatctccataccaagatccagatcagaaacttctatctccaagcctccagataagggtcactggtgagccttccaattctgaattgtacttcattccaaatatagtcaagttgacaaccaggaatagccactacaccattgttgccagatatggggcaagacaaacaaaacaacccttgaggaagagtcctagactgataaagaccctgacccaaagtaactcgaggaggaaaggattttacaggttagaggccattaccaaggacagccaaggcagaaatgaagaagggaaatttggtcagaatatattatatgaaaaaaatattttcaatttaaaaagaagaagataggaaggaagaagcctttgggaggaactgcagcagaaccagcaggagctggtttgaataagaatggctcccatagaatgatgtatttgaatgcttaggtggcaaggagtggccctatttaagaatcctttggagctaaggctttgttaaagtagttgtggccttattggaggaagagtctcactggggaagggctttcagaagcccaagcccaacccagtgtctctctcctgcctgccagttcagatgtggacctctcaactacttctctagcaccaagtatgcctgtgtgcctccacaatgatcatggactacacctctggaactgtgagcaagcccagattgaatgctttattttataagagttgccttagtcatagcatctcttcacagcaatagaacactgactgagacaacttgcttccccagctcctgctcagccacatttctcttactaccccaaaccatctgcccagggctggcaaggctctcctccatcaattagcgatcaagaaaatgtcccatgaaaatgggttaatctgatggacgctattcctcaattgggattctcttccttggtgtctatggcctatttcaagttgacaaaaaccaactagcactgggaagaaagatttatcttggctcatggtttcagaaggttcaaccgatgctttttcttggtcctattgtaatgaacacatatggcaggacacagagatacgctcatcatataacaacaagcagagagaatccaagaagccatggcaagatacggtcccaaagggcacatggccaatgattacttcctccaaccaagctgtacctctgacctttaaccacctcccccaaatatagcatcttattgtgaaatatatgaagggcttaattaattcattaactcagacccttcataatcaatgataatgccctcacagacagagccagaagtgttcctcactaaccttttaggcaccctttaaatccaatcatgttttctgtcaaaataaaagttgtagttctgactgaagaatggctcatggaaaggtattcttcagagacctctgaggggtgatgtagaaaaacaggaaatccctgggactgtgccatagccatctgctttcttctcagtatggaatggtgttaacaacattgtcacctgtgtagacagtgtggaacataggggtggcagttggtcagatgagcagagcctccacagagattattgtctcccttctgggaacagtgtaaaagttctgcaaaacaccctatagctcagtttaagtttctatactacctccagtgtactcctgctctcctggcctaattatgtactctaagtgcccatcttaaatgataaatgtgatccacctagcatgatccgactcagcacatctactctggccttcaaaacattccttctttctgggagtggtgacacaagtacatatttattctggaggcagaggcaggaggatctgagttcgaggccaacctggtccacttgtgagttccaagacagactgagtggcacagggagagcctgtctcaagaaacacacaaggaaataaatcccttcctcagcagcagcagcagcatccgaatctcacagaaccatccaggagagtgcacagactgtcaagggtgctaggagagaggagatacagaagcagccagaaagtgggtatcgttgctgcctactgatagaataagaagtgtccgtaacttgagggcaggaattcaagtttcccagaagagttgggattagtccagagtgaggcaggtggagtggttcctgggctacaatgcatcttcgcatcatgctgcagttaaaggaatagcaggcaacaacccatcttggttatccttttagaaaacatcacctgaatttcttcacacttgatcttagccaaaagactaagaagcgattctcctgaatttcttgtggatccatatgaatgcacccaaagtaactaggatattaagtccggggggggggcactcaagaaattagttgcctaggctgtgtgtgcagtatccccagctttctccccgcttgtgtgtgcatctgccaggtgggtggttctagcgttactcttctaagacctgagttagaaatgccatcagctatgtatgactgtgtgccctgtcttgtatttgcctcactaaactacaggtgacatcagttgcaaggggatgaccgagcgcattcacagcatcaaccttcacaacttcagcaattccgtgctcgagaccctcaacgagcagcgcaaccgtggccacttctgtgacgtgacggttcgcatccacgggagcatgctgcgcgcacatcgctgcgtgctggcagccggcagccccttcttccaagacaagctgctgctgggctacagcgacatcgaaatcccgtcggtggtgtccgtacaatcggtgcaaaagctcattgacttcatgtacagcggtgtgctgagagtctcacagtcggaagctctgcagatcctcacagccgccagcatcctgcagatcaaaacagtcatagatgagtgcactcgcatcgtgtcacagaacgtgggcgatgtgttcccaggcatccaggattctggccaggacacaccaagaggcacaccagagtcaggcacatctggccagagcagtgacacggaatcaggctacctgcagagccacccacagcatagtgtggaccgaatctactccgcactctacgcctgctccatgcagaatggcagcggcgagcgctccttctacagtggtgcagtggtcagccaccacgaaacagctctcggcctgccccgtgaccaccacatggaagaccctagctggatcacacgcattcatgagcgctcccagcaaatggagcgctacctgtccaccacccctgagaccacgcactgccgcaagcagccccggcctgtgcgtatccagaccctggtgggtaacatccacatcaagcaggaaatggaagatgactatgactactatgggcagcaaagggtgcagatcctagaacgcaatgaatccgaggagtgcacagaagacactgaccaagcagagggcactgagagcgagcccaaaggtgaaagctttgattctggggtcagctcctccatcggcaccgaacctgactcagtggagcaacagtttggggcagcagccccaagggacggtcaggcagaacccgcccaacctgagcaggcagcagaagccccagctgagagcagtgcccagccaaaccagctagaaccaggtgcctcctctcctgagagaagcaacgagtcagagatggacaacacagtcatcactgtcagtaacagctccgataagggtgtcctacagcagccttcagtcaacacatccatcgggcagccattgccaagtacccagctctatttacgccagacagaaaccctcaccagcaacctgaggatgcctctgaccttgaccagcaacacacaggtcattggcaccgctggcaacacctatctgccagccctcttcactacccaacccgcgggcagtggccccaagccttttctcttcagcctgccgcagcccctgacaggccagcagacccagtttgtgacagtgtcccagcccggcctgtccacctttactgcacagctgccagcgccacagcccctggcctcatctgcaggccacagcacagccagtgggcaaggcgacaaaaagccttatgagtgcactctctgcaacaagactttcacagccaaacagaactacgtcaagcacatgttcgtacatacaggtgagtgccccttctctgaaggcttggcagcagggtgtggagggtcaactgtggaatcaacagagcaagatgatgcatagaagggaagggataatgtcatcttccagatcccaaagaaaccccaccatgggccccctttagaaagaagtctagctgtacctatcataagaataaagtactcccaagtcacaaaaatcctttatgggaaaagtgacctaaattcaagtacctgagttttggagatgacatagtgtgggtccaaagcttgctctttggaggaagaaattgctctttggaattcaggcccagctacttactaccaaactgtgtcaccttggtagaaattacctaatactttaaactttgacttccagagggaggaggggagagatagataaacagatggatagatagatagatagatagataggtaatagataaataaatagatggatagatagataatagatacatagatggttatagatggatggatggatggatggatgagatagatagatagatagatagatagatagatagatagagaatagtagtgacataccttccttgtgctgcctctgagaactatattaacatatatgacttaaagatgtcgctagcatagtaaatagttatagctattattagcagtatttagatggctgaaagaagaaagtaagtttattctgttccaaagatgaattaattaattaactaattaattaatttttaaaaaattgggccactgaaagctttatgggaagtctttcaaataaataaaagaagttgaagagtccaaggtactctgaactgtttgcttctccaaaggaactgggctcctgtaactaggggtctttaaagagagaatggatagtttcatgaagatactatcccaaggacttggaaaagatagtggttccctggatcctaccactccagagataaagagctccaaacctcagaggctgccctttccttagcatcatgatgggacacaaatagaaatgcctccatataagacagtggtcctcaacctgtggatcctgaccccatttggggttgaacgatcctctcgcagaggttgaccaagaccatcagaaaacacagatatttacaattcataacagtagcaagattgaagttaagaagtagtattgaaaataatttgatggttgagggtcaccagaacatgaggaactatatgaaagggtggcagagttaggaaagttgagaaccaatggtttaaaagatcatgtctatggttatggcttctcataggttcactccaaactaaaatcactgactgcaacacgatcatcatctttgaaattcttacaagagtcactctcctggcaaagttttgagtctagactagtaatgttaaataaaataatttgtcaggaaatacttacatacatgagtcctaatacagaaaagcaaattcactcctcagagcagccttaatccccacactgggctagtgtgaatcagagacatagggcatgaagcacatacattcagagtgagggctagaagaaaagggcagcaggtgagaaggagaaacatggaaccgagcaactgaaacagcacattgcctaggcggagttttgccttcatcgaagttcagtccaagtcaagaaaatgtattaagtcagggtgtggctttatgtcaatcacctgtgcttaagtcttagtgttcatacctccaaataaacacagagactcagtgcttaatttaggaagtaaactgggtggtgatgtgtcactgtgtttacctagggtgaagtcgaacacagcaataacctgaaaccaatcaagggagctaatgaaacagcatcctcagctgtgtagtagtttattacaaatgcgctctcaagttgtacccttttattcagaaaacagctgatctaacagccatgaaattaaagataagcagaagttggggggagccatttatgaaagtctctctgtagtcaaagttgactttgctaatcttggatccatacatcccttctttgctcttttgtgggtgtcttgtatagtcagtcatgtcagatagaaaacacatgcatccgttggttcatggattcaaacagggccttaaatttgcaacataaaactcttgtcctacccaaaattctattcaatgtataaaaggatttctagagtcaccaaagaatactgtacttaatccaagtaagtgcctttgccagtgataaaaacagcaatggttttacacacctatatattacagaagcacaaagctatagataaagttattcttatagacccgagctatactctaaaagtgtgatctgcacaacacagtaaatgattaagctcctaaataaattctgaagctatttaaatgtatatagtgcaggtacttctggaaacaatattgtacatgtgccaatgaggcatctagttcttataccctttgccctttctcctagagttatttgccactggcagtttggaaagtccatccatatttcaatattgaacatgaaagcaaaaaaaaaaaaatagagaaaaagaaagatagcatgggacaaagcagggttctttctcacttctcccatcaagagacaaaacagaggtcaaaataaaggcgtgggtggggcccagaaccagagctggagggaatttgaagtataggccttgctgttgccatggataccagggcaaacaacagggtatcttagaatttatctggaaactccaggtggaactttcttttaagatccaaacttagggcattttacttaaaaaaaaaaatctataaatgaatatgggctagcatatgtagttgcttagcaaatgtttgttgagtgagtatgtaaatgaatgttcaaaaatgcggacatgctttccaggagaacttaattcaaggaacttatacataaatgcatccttttctctgcacgacttttagatttctttcttttagaaaaagagctttagaatatattgtgcagtatctatattcccacttgtggcttttcaccaacaaatgatagttctttggcttttttctgaatcatatgatcaacagcccatccgttggtgatgtttttcagcccattgatatcctttgcacggaagataattctgcttgtttctttggaaactcagctttttcagccataaattcaatgggaaagagtaatggctgtggcatgtcagtgttagcagtaggctactaagagagacacaggacaatgctattaccatccacataggagttgaactgttaaacctctcacggtggtgaatatatgttcagaggaggaaggcctcagtttcacctctttgtaactaagtgactttaagtgctaggctgaagtggaatcacagtttttggaggtcttaataataagttaaccgaggactgaggaatagaaacagaagcatttgaccataaatgctataactatcattaacacctaggaatatatattacagaaaccccatgcattttccagcatgatccaggacctgttgatggtagcaggagagttagcaggcttgggagcttatcttactcttggctgccatttgttggggtcttgaaggaatcagcacaaaggaacaggagataccatttcctggagtgttaaaatccactccactcacaatgctgtaagaagtcagataataaagcaaactgttcccctaggtatttaaaattctgcttttcactgacatatctgagtcgtccatgagccacagccgtgttaatgtatatgtccccaggtggcagtccctcctagacagtcagcagggaataggcagaaaggtcatcacagcatgccatccatggcctcctgctccatgccctcttcacagacaccaagagtaactgtgcagccattggatcaactacattcctgctgttcataccaagccttttcctgttttctggtccagtcttcattttttcccactcagaaacctctctttcccttcctctgacttccttggtttttttgtttttttgtttttttaatactcaccaagcatcctgttttggttttggttttctgacaccccacccctacccccaaccccccccctaccatgctcacccaaagaaaagggtaggtattaccctgccttggcatgtgtaactaagagtagaccacacgcgtcacctttgtttactagtgtcagtaaaacagcctgctttagggatcggctgaaacattggttttgctgctttgctttggcttctgtttaactcaggatctgctttccgatgcagtgtagtgatttctcagatggtttactttatcctcagttcctgcaggctggatacaacagtttagttttccttaaaatgaccaatactcagtgctaggtaccgtctcattaattttcaaaacaagttcacacatgtgtactttttgaaccattaccaagttctagataaggagaccaaggcttagaaagctttgataacatgtccaaatcactcagccaagaaatggaattcatagcggactccttccccagaacggatcactttaaagtgaaggggctccttgtgcccactgccctttatgttatggttcacaaatcctctttgcattttgtgacgcttcctaacaacccaaacttgtggacatgaccttaggctccaacccagaaagccatctgagaccgtttatcatcttaacctcagatttctccacctgcagagtgacagtctacagaccactcatttcatgaacagtgccccatttcctttaaggtttcctctaagtaatatgtaggggagtcagtggataggaaatgttatatgattcctgctgattgatgttgtttcaaatctttccatatacggccggcaagtgtgggcaaatgactgatatgaaaatagacccaggtcattcaggcagtccctgaaatgctcagcgccaccattccagaactgcagtaattatagagagcaccttcctctgaccagcgcctaggtgccttgtgcacactttgctcattaacaaccactccattttgctgtggtagggcagacagctgggtactttgtcctatttaaaagtgtgggactgcccaagcattgagtgattaagcaggttgccctcaggccatttgctggcaaggccaggactagagatctcaggggttgttgaccaccctgagatgaacaccagtaaatcccagagccatagcaagtgcttgatccaatttatcacttacagaaggcaaatcaaacccagagagatagaaacatttaagaagtccagggtcacacagataattactgacataactgtactacgtgcatacaaacaaccaacgcatatatgcgaccgagaagatgacaactgtgaagaatcgatttgtggtgggattagaagggtgtgaaagcaaagagccttgattggtgaccttgcctggaggaaaagcagtcagaaggtgaacgttcaaacagcaagagcatttaacagtttcaccttcctaacaggccaaaatactgtctgcagtttaaggcacgcatgcttcccatgaaagatgacagtgggcatgttttaagagatagttggccagcctctcgtagccactgtaaattatactgaggacacaaggacagcaaagaccagctgagctgcaagcatgtttacagctgatggcagtgcctcaactaaaaataacatacatgcttgtctccaagggaatctctcatttacagaaactttacaaatgtaaacactgtgtataggccgagctctttagcaataagccttccccagattctcctttttcaatctaaaaattaaactctcttttagccctaggatcctgcacttcatacttccccataagaatgctttcattcaagatcccttatgttagaaataccaagaaaattgtctaattagagagagttccatacgatgaaacataaatatgaggcattcgatccagaatctggcatagtaaacattcagtgtgtgggtgttcgttttcttgctatgatacatgatacagcagcgtcttcagaatggaaaaatgagagccacagtcaaggcccttagttaaatggaagttgactcaagtttaaggagtagatcccttggcctgctacacattctctgatagggtctcgggcttggggctttaggcaccctgaggcagatgtctactttggcctgtcagtaatgagatggaagaggtagagcatacactttagagaggttttgtcatctgtcaaaatcagaaaagagcaagtgttgagaatcaatattaataatttaaaaaagcaagtcttttaaacaattatccaaagtgatgtcccagacccatgtacttttaggggtccccatgtcgccatccactgactagtcttaccttactatttttaactagctagatgatttggtttcagagccaatggcagacaaagcaataaacacacaagaaaaaagggccgtgccagctggctaagaaaaaaaaaaaaacagaaaaaactattttagaaattaacctaaaagttcaaaaagcatatggaaccgtttaatggggggaggatgtagccttgtaataagaatgccatgcaaatattcccacaccgcccttggtggtctacaaagtgattccatgtgtatttcatgtcaacaccatcacagggaggtaagcaggacggtgtacctcagaggttcttggtgatttgttatgatggcgcacagggtgttggtgtctatgcttgaacaaggctcaagatgcaatggttgtccaccatccattcagctgtcacagccagcaaggtcaacctgcaggacagtgcaatcaacacagaatagccagttcattctcaggaaaacttctatcagcaataatgtgtgcatttattaggccgagtagtggaaatggagactttctgaaaagaatcaacttataaagccaatattctcacttcacaatgattatagcaagcccttccctatagcaaaagctatatatttagctcttatatttgtttgataatattacctggaaatgtgtatatcttcaataatggtcctgaggatggcgcctacaaagcaccttcttgggttttcttccaaatgacctttgaagagttgggtggatccgtgttcatacttaacacgagagcagtttctggtcatggggaaatggaaagctctagactctcctggctttcttaaaacaagcttgctctgaaaaggaggccagagaggcctagatctttccaatcaaggatgatccataaagcaatcaatttttacttttttttttttttaactttttgtttttctttgctgttgtcttgttttcctgtctctcattctcccactctggctgtgtcttgttctgtcctgcttgctgtctcctcccgcctcaccaggtgagaagccccaccagtgcagcatctgctggcgctccttctccttgaaggattaccttatcaagcacatggtgacgcacaccggcgtgagagcgtaccagtgtagcatctgcaacaagcgcttcacccagaagagttccctcaacgtgcacatgcgcctgcaccgcggggagaagtcctatgagtgctacatctgcaaaaagaagttctcccacaagaccctgctggagcgacacgtggccctgcacagtgccagcaacgggacccctccggcaggcacgcccccaggtgcccgcgcgggtccgccaggcgtggtggcctgcacagaggggaccacttacgtctgctccgtctgcccagcaaagtttgaccaaatcgagcagttcaacgaccacatgaggatgcatgtgtctgacggataagtagtacctttctctctttcttacgaaccaaacaaaacgacaacaaaagaaataaacaagcaaacaaacagacaaaaagctatggcactagaatttaagaaatgttttggtttcctttttactttctgtttttgtttctgttccgtttcattttgtactacatgaagaactgttttttgcctgctggtacattacatttccgggggcttgggtggataatacttttcccagtcccccttggatggtggccttaaggcctggtagtgcttcaggaggtccactggttggatctctagctactggcctctaaatacaacccttcttt

SEQ ID NO: 324 - DNA, 3237 bp, Mus musculus
attaccactcacactgtacttccagggagacaccgattatgagaagagaaactcagcgctggggaagaagataactgaatggagtgtttgaattgcgctttgcgactctgaaggctgaagagttcttgataaattgcaagtctctttgtgcctcatagctgcacaggaatggctgtttgatattggaaaaccagttggtgtgctcttccttggactgcctgaagttacattttgagactgaaatcactgcaccttaaaaacaaaagattgggctgcactgtgttcctactcttttatcatcagcaattgaatatttcacacaacttgctggctgtcccttgaccaccagtctgttgcctgttgctgctcttcatatgcagccactctctgtcccctgccccaatgaacatctgcactaggcccaagccttggagtgatttacctgaagagtgacaccaattatctggaaactactaaagtataattgagaggaacagggtgaaggaaatgcaaatgcgaaagggaagcagtagatgaggaaactgaagcccagagaagtgaagtgaggtgcccaaagccacacagcaagttgcaggcacagctagttccgtagctcaagtctcctgactcccagtccagtgttcttcccattactccacgggtcctgtctctaagcttcctgacaaatgctagaacggaagaaacccaagacagctgaaaaccagaaggcatctgaggagaatgagattactcagccgggcggatccagcgccaagccggcccttccctgcctgaactttgaagctgttttgtctccagccccagccctcatccactcgacacattcactgacaaactctcacgctcacaccgggtcatctgattgtgacatcagttgcaaggggatgaccgagcgcattcacagcatcaaccttcacaacttcagcaattccgtgctcgagaccctcaacgagcagcgcaaccgtggccacttctgtgacgtgacggttcgcatccacgggagcatgctgcgcgcacatcgctgcgtgctggcagccggcagccccttcttccaagacaagctgctgctgggctacagcgacatcgaaatcccgtcggtggtgtccgtacaatcggtgcaaaagctcattgacttcatgtacagcggtgtgctgagagtctcacagtcggaagctctgcagatcctcacagccgccagcatcctgcagatcaaaacagtcatagatgagtgcactcgcatcgtgtcacagaacgtgggcgatgtgttcccaggcatccaggattctggccaggacacaccaagaggcacaccagagtcaggcacatctggccagagcagtgacacggaatcaggctacctgcagagccacccacagcatagtgtggaccgaatctactccgcactctacgcctgctccatgcagaatggcagcggcgagcgctccttctacagtggtgcagtggtcagccaccacgaaacagctctcggcctgccccgtgaccaccacatggaagaccctagctggatcacacgcattcatgagcgctcccagcaaatggagcgctacctgtccaccacccctgagaccacgcactgccgcaagcagccccggcctgtgcgtatccagaccctggtgggtaacatccacatcaagcaggaaatggaagatgactatgactactatgggcagcaaagggtgcagatcctagaacgcaatgaatccgaggagtgcacagaagacactgaccaagcagagggcactgagagcgagcccaaaggtgaaagctttgattctggggtcagctcctccatcggcaccgaacctgactcagtggagcaacagtttggggcagcagccccaagggacggtcaggcagaacccgcccaacctgagcaggcagcagaagccccagctgagagcagtgcccagccaaaccagctagaaccaggtgcctcctctcctgagagaagcaacgagtcagagatggacaacacagtcatcactgtcagtaacagctccgataagggtgtcctacagcagccttcagtcaacacatccatcgggcagccattgccaagtacccagctctatttacgccagacagaaaccctcaccagcaacctgaggatgcctctgaccttgaccagcaacacacaggtcattggcaccgctggcaacacctatctgccagccctcttcactacccaacccgcgggcagtggccccaagccttttctcttcagcctgccgcagcccctgacaggccagcagacccagtttgtgacagtgtcccagcccggcctgtccacctttactgcacagctgccagcgccacagcccctggcctcatctgcaggccacagcacagccagtgggcaaggcgacaaaaagccttatgagtgcactctctgcaacaagactttcacagccaaacagaactacgtcaagcacatgttcgtacatacaggtgagaagccccaccagtgcagcatctgctggcgctccttctccttgaaggattaccttatcaagcacatggtgacgcacaccggcgtgagagcgtaccagtgtagcatctgcaacaagcgcttcacccagaagagttccctcaacgtgcacatgcgcctgcaccgcggggagaagtcctatgagtgctacatctgcaaaaagaagttctcccacaagaccctgctggagcgacacgtggccctgcacagtgccagcaacgggacccctccggcaggcacgcccccaggtgcccgcgcgggtccgccaggcgtggtggcctgcacagaggggaccacttacgtctgctccgtctgcccagcaaagtttgaccaaatcgagcagttcaacgaccacatgaggatgcatgtgtctgacggataagtagtacctttctctctttcttacgaaccaaacaaaacgacaacaaaagaaataaacaagcaaacaaacagacaaaaagctatggcactagaatttaagaaatgttttggtttcctttttactttctgtttttgtttctgttccgtttcattttgtactacatgaagaactgttttttgcctgctggtacattacatttccgggggcttgggtggataatacttttcccagtcccccttggatggtggccttaaggcctggtagtgcttcaggaggtccactggttggatctctagctactggcctctaaatacaacccttcttt

SEQ ID NO: 325 - protein, 735 aa, Mus musculus
MLERKKPKTAENQKASEENEITQPGGSSAKPALPCLNFEAVLSPAPALIHSTHSLTNSHAHTGSSDCDISCKGMTERIHSINLHNFSNSVLETLNEQRNRGHFCDVTVRIHGSMLRAHRCVLAAGSPFFQDKLLLGYSDIEIPSVVSVQSVQKLIDFMYSGVLRVSQSEALQILTAASILQIKTVIDECTRIVSQNVGDVFPGIQDSGQDTPRGTPESGTSGQSSDTESGYLQSHPQHSVDRIYSALYACSMQNGSGERSFYSGAVVSHHETALGLPRDHHMEDPSWITRIHERSQQMERYLSTTPETTHCRKQPRPVRIQTLVGNIHIKQEMEDDYDYYGQQRVQIRNESEECTEDTDQAEGTESEPKGESFDSGVSSSIGTEPDSVEQQFGAAAPRDGQAEPAQPEQAAEAPAESSAQPNQLEPGASSPERSNESEMDNTVITVSNSSDKGVLQQPSVNTSIGQPLPSTQLYLRQTETLTSNLRMPLTLTSNTQVIGTAGNTYLPALFTTQPAGSGPKPFLFSLPQPLTGQQTQFVTVSQPGLSTFTAQLPAPQPLASSAGHSTASGQGDKKPYECTLCNKTFTAKQNYVKHMFVHTGEKPHQCSICWRSFSLKDYLIKHMVTHTGVRAYQCSICNKRFTQKSSLNVHMRLHRGEKSYECYICKKKFSHKTLLERHVHSNGTPPAGTPPGARAGPPGVVACTEGTTYVCSVCPAKFDQIEQFNDHMRMHVSDG

SEQ ID NO: 326 - DNA, 761846 bp, Homo sapiens
cacaacatcaagagcaggaaaatggactcattagggaggcaggcagtcattaccactcacactgtacttccagggagacaccgattataagaagagaaactcagcgctggggaagaaggtagggcagacaactttcttaaaaaaaaaaaaatcctgcttcctcaatgccccctctgtcatctcctttagcccccaatgcctttattctttcctgcttgaattttaatttccagatttaagtttgacagagctagtgctagcttaaaatttagaacatctgtaggaggcctaccctttactaattttcttcctacttacttaggggtgtgcccttgtgattcagttttgttactttaaaaataattacaaacaaatctatttttctcactaaagtaccaaataaatcagaatctttcactcttttaaaacagacccttccgtatgtttgtctctttgcttttcttgtctgtttatgcaattccatctgtctgtctatatatcatgttgtccttatttattgctaactcggttttgttagttatttgccaatgagttttagctgcagtgccagtgtgggtattactaaagtgagactcttgttctttgttttatgttgaagtttaaagtccatatttacagtttaaatccttgaagcaggttgaatactttttgccagcatgtttatttaatgccattggacataaggtgaggggtagttgctgagggtgggtaagaatggagtaattatttttgtcatcacacacatagaaacattgcatctgggggatgtatttttaaacaaataaggtattctgttttctaacttttattttgcagatgggcttttacatttataggaatatcactttggttagtaagaatgcgaactttcttaacaagcagtttttatcctaggacagtttccttttagtatgttactgtttatttatgcttggggagggtggagtgaggggctggccatctttttacaaagtggaagctatgaagtgtatcaggccatcttgcacaacaactgtaagtattcatttaacattttggggagcataaataatataatttttatttcaaattcagttttgtggtgctttcttttcctttatttctttttttcttttttatagtgggaaaagttacatttcaaactagcagacattgttgaagagttttcccagaatagtgttcttcaaaattgaaaggattattttaataagggccatttgaaatggacttcttaatggaattttatttcagatttgtcaaagtaaaactgctcttcatttgataaaatttaagtcacatagatacacaaatgtttcggcatatacagagcaatgttagaaaatggatgctgatctgtagagatctttgataataacagtcatctttttgtaataaattatttatttaacagaagtggcagacttttttcccccttaattccattaggcttctctgacaacacaaagaagtccataaagcaatattcttaacccacctgggacactagagcagattcccaaacacattctcaaggttcaaacctagtaaaatgtttattaaaaatccattatttcaggaaggtgatgaacttttgctgctgaaagacttttttacctcttcttttaaaaaattaattctgagactttcaatttgcttatcttgcctgaacagtttttttaaactggataggctggctttgaccaagagtagtacaaatactaagtacgctcaatcaggtcccgtcggagatttttttccgtaaggtctaaggggaactttaggagagtattttatgttaatatggtacacgataattttgtttttcatatacaattttatatatactttatgccatttctgacggtgacccaaaaatttgtttcaaaactgatactgtatgtcaaaagtgtacatgtctcatgcacctgtcattttctgtgttagccttgtgaggaccatctaaaattctactgtttttatcaatagaaatctttcatctatgtcttgattagtcattctctttttctgtacacacatacagtggcgatatctgtgcatacatgtgcatgtatgacacgaagtcatacatgtatggataaatacatcacagcttcttttcagatacaatatttttaaaaatttcactttatgtgtgtttatgttaaccacaagcaaacaaaaaatggagagaatttcaagagaaaaatgaaaatttcctttaaccttttagcaagaataaaagcaagtaataatgtagccatttttatgtttggtttaatttttagaatgtgtatatgttttcttttgcattataattcttaaccttcagtagatctaaaatatttttagtatgaaaaataatcttggccttttctgggagggactgtcacaatctaaatacagaaggacattataaaatgtgcataaataaacttcaaaccactgtactctgctgtatagggatttggaaagctgaaaggcttgcgttacaggagcgctatagaatgccagaaaaattcattaatcagccttattggttatagtgggctcttcctatcagcacatgatatctgcctgtttagatccccaaagtcttggtcaggtcacagtgtgtttcattttaatgttggagcagacagttacctaacacacccacatgaggaagtgctctaagaagttacttcatgctttgccatgccctgtagctaaaacaatttggtactgagtgacgtgtgtgtgctttttaacgtgtgtgtgctgataaaaatcagctttggctctttgaaaaggaccaaacagtagattttttttaaaaaaaatagggcactttgggaggccgaggcgggcagatcacgaggtcgggagatcgagactatcctggccaacatggtgaaaccccatctctactaaaaaaaaaatacaaaaactacctgggcgtggtggtgcatgcctgtagtcccagctactcgggaggctgaggcaggagaatcccttgaacccgggaggtggaggttgtagtgagccgagatcgtgccactgcactgcagcctggtgacagagcgagactacgtctcaaaacaaataaataaataaaatcaaataaaatggaatgccagaccatataattcaaatgctaagcatatgccagtttaaactttttcttcttttttaacttaagaggagaatcactatgattatttttaatataaagactatatagtgatttattggattttactcattagggtttcaaaaattgcagatactttttattctgcacatttttatctccagaagcctatattcatcaaaaggatagcagctgcatactttccccatgaaatgttaacaaataaatggcattcctgtttatttatctatttttgaattttaatgattagtccttgtgctaattaacaaattctcgtattcataaaatctggcactacataaatatctaattgtgtgattatctacacatgttctggctttctataaatatagaaattatcagtggatgtgttcatggacttgcccaactctaagcagtggccggtcatgccgccacataggaagccaaattcaggccctgagcaaacgtgttaccccaacatctggcaaggtatgttgaagcagcagcacctggctaatattgctaactagtgatcttttctggcaaaagaatgactggtgttgatattctttgaatgctgctagctcctgggttcttcagcctcaagggtggcctctgaagtctaaatgttgaaaatggacattaaagctggtttatcttggaggtcactttataaatatattttaacaaactacatttttggtgggagacatgttttactgtaaaacataagtaaaatagtatccttatccctcactttcttaaccagtgaagatctaagttaccatgagaagtcacaaagcactgaaaagaacctctaaatattttcatttgcatggctgtgtaactatttcagggacattatagaaatcaggtattacctacatagaaacagtttaccctccatcaaggacaataaacactagcaatcggacaggtgtgtacctgccagagttatcattaaattagaaaccaaatctttaaaataatttgtttcatactgtgtaagacatttttgttattttatacaattactatggattatttacagtgctaatacagtcagcatttacatttgatactttacaccaagctttcaagtcatgtataggtgtgtaggtattttacaaaacttgaaacttgtaattttcttgaaaaacccatttcatacatttccattgcttaaataaattctagcattttgcataatctccaggaactatagctaatgtcaaataaactagcaagatcaattttattctttaccaaaagcctgaaggcaatatacatatcttagatattctagagaatacctgaattcatgttttcctattacatagatattatacattaatcatcaaataatgttgatgacaattatgtttaatatatcaaaatatccttgagctcccctagttctaattcagcataggcaagctgatgaggctatgggaagaaatatgctatctatgattactatcatgtatgtagtaaccactacagccggtgttagaaacagcattcaagggcttataagaaaaagggcttttttttgttttgttttttgtttttgccactctagctgttcaactgtaataatgaataagtggcatgctatttctgtactaaactgtggaaaaattatgcttgactttggcttcataacctctcttatactccaggatcaagccttttggtaattctatagttcatttgaaagtaatcagcttgaggacatggagcttgcctttctggaatcttttgacactcagctgaaactctagccttggtgttttgtagttcagttaaccaatgcaacctttgtaattgtcttaacttggggaaagctggctactgactttcaagtgagaatactgagacaaggaacaaggactatgagttcattgattcatctagtttccagagggaagaagaacatattttttattaattctgaatattcagtcttacctttgaaactctgatagaaaatgtggtaattacagcataatatgtttaccttcttgatattggaagtaattttgtcactgaatacttctgtgtcttgagatatgatgaatttaatgttcatattatgcatttaaaaggtcaatctatttgaaagtttttatattacattactaatgtaaggatttacattcaacaaatataaaattatggtatgaggttggggttatgggatatcaaaaagatagatgcccaattggttgtaactaaaaatgtagaaatggtaataattacgaatcttatacatagtagtactatttttgttattgggaaaattcttaatttaaactttttaaaatgaaacatttaaaattatttaaattttaattttctctaatttttagaaggctttacatttttgttttttactgaattagcttagatatttgccatttttaccttttcaaaaattttctgtgaattactgttgtaattaaattgtgatttgttgttgcaattccttttatagtatgaacttctttcctgtaaatggaatgtaattgagagaaaattaatgttgtcagtttgttcaggtagcaacttaaaacttagttaaaaaaaaaaaaaagctattactagcagaaaactagaaatgttccaggctatgtaatttttctagttgatatatatgtgtatgtgaaaactatgtggcttcattttaaataaacaaaaatatcttatttaggcaccaagacatttaaacagtgagaaaatgttcctctcttttattatttaaatagactaggcaaatactttgtaatggtgactttataaattttttgtttttttttcttcttaaatactggacacattaaaattcttcttggcccaataaatatactctggttctgaccatatttactaatttctccacttcttggttacttgtacctattaccttagctttaggtaaggcaaaaataacttactttttatattagcccttactttctctagttctccaaatcaacagtgatctttatcccctcacctcatttctagaagggagacgactagagatgattaagaaacaagtagagagaagttgagataatgtgaagggataaagctgagggtacaggggtaaagctgagggtagctgaggggttggtgcttttgaagcttctaaacttagaagtataatgaaataaaaagacttcttccctaactcccgttaaaaagcatttgacttatctgtacagcattagtttttgcatctctctaaagcagatctatataaattccctctgcactccaagacagattccagtggtaccaccaaagaagatcatagaagaaaaagtcaaaacatctcacatttctagaacatccactgccaggtttccttcataccttttgccctttaattcttgggttcggagttgtgagcagatttttatagttggtggacagatttcatttgttttgataagaagctttaccaacaacacattcccaaaacatgcccccaaacagcatcacatgctgaattaaaatagatgaagtgattagctggataagtgtgcgtgtgtttcctttttaaaaacaaagtcaaataatttgtatgaaacaaaacaaaaagaacttttctagcagtctgaatgaattcaggttgtttcacataatggctttctgaaaccattttttgtatagtaattttgaccaacacatccacctattccctaccccacttgctttttcgctttctaaatgttggatgaatgtaattccttaatataaaaataattgtgttcttataacacattcaaaatatacctatggatatgaagatgtggtacggcctatacacagtagtttcacttatatcaccttagtctgaaaatatatgaataaaaaacatttttagaaattatttttctggtatgttgaaagaaactttatggtgtgatacaaaaagcatttcctggggaatcaggaggtattaatcaatatcaaaaaggatttaaagtggttaaatctggaggtctggttttttgttctgactttgtgactttgagtacatcatgatctctctgtccctcagtttccttcctgtaaaatgaggagaaagctttttaaaatattttttcatcttaaagactgtgattttaagtagctatatatgtagataatcttgcttgcattttctatctaaaagtcacaaataaatggagaaaagttagggtgggtaataaaggaagaataacggacatttatgtggcttgagagagcacaggcactttaattttgtgatgatttttcttagcttaactacatatcataatgtattattgagtctgtttaatgattgaacgaatgccataaaccaaaaatagtcatttgtcagacaaactgacttaattgcctatgggtgatttggtaaaagggctgtttttaatggaatgaagtgcagcatggttactatggctccactcctctccactggccactagatggagaggcgatccgtgtccactgccttgccaatagcaagcagttcacttctgacttcctaatggcaaagctgcactctatgcctttggacatttctatgaatacacacatgacattttggagaagtcatcagagaatatgtcctatttctatataggcatgatataatattcatgaaatgcaaaatactcctctttaggccagtgttaatgttggtagacccagtcggccagtattacaactgtggtgttagttgtcacaatagggtctattctgtctcttacaaatttgtccatttagaaaggaccctgaaatgaatgtcagcacgacagtgccaccttgtgtccctgttgctgtgcaagtaactgatgcatgagttagtgaaaaaaacaaacaacaacaaaaaaacaggacatttgcaaaaaattggcaaattgtttcaggccctgatttcgtagtagctgtaccaaaattctataatatgttttagtctttgaaatttcttattacccaagaaaaagttaggatgtgtgcactttactacttttctcctatcagggtatataaaaaattctttaacaattctaggcataaacagggaagtatttaatttagaattggaaatggagaagacagggattgtcagagatactcacttaagctcggtcatttcaggcattgaggtgctccttctttcacattcccacagcaattttatatgcataacttggcaatatcacctctcacattgtattgccattgtttgtaagcacatcttccaactaaaccttgagcttcttgaggatagtgtctgtgtcttattcatcctccagaaccttctattggcattcagcacagagctatgcaaatatttgaggtctaaacaaatgattatgtctagctggtttataacattctcgtgtatatatatatatatatgtatgtattatatatatgtgtgtgttatatatatatatataaaatacacatttctttgttgtaaataagtttggagcctttttactttggaaaaacagcttctgataccacttcctgcctaaacatccctttataaattaccttcttccttttatcttaaaatgaccattttctctttttgattatgaaaacaaggcattgcctattcacaagtgtgtattgtaattgactttgatgtaaagataatttttaattctagctttacaacaaatttgctattatttggggtaacatacttaagtttttttaggtctacttcctatgtataaaatgagtggactggactagttgatttgacaggatttttgtagggattgggcaaatgttagtattattctagctgtatatttagttgtactttttaaagtaccatcatagttgaaaatgaaattgctagcctttgaaagtgctatttgatatttcatgttttagaagaggaaactgaggcaaaggggcttataggggaatgaattgcaagtaggcagagtaaatagtattataatggatgaatattccatttttttatttgtttttcacttttttgttcatttgtttttggttaattgagctccactctccttctattctttaaccatataataaataaagtacaatgaacttatatagtaagatgaacccacaggttggtagaggactatggactacttgcagttcagagactctcatgctattttgagtttgattcatagcacttaaaaatgaatcctaagttttaaatttcacacagttttgcatgaaatttacatctagaggtttcagtccacgtattaccataaataccagcaaacttatgactgggcaaattgcacaaactttttaagagttttcttattggcagaaatgtgataatatatattacctttcctatctacctcacaaggttattgtaaggattaattaagttaatatatatgaagtttttttataaatagtaaagtagtatacaaatattatttattggcattactgctctaattaaagaaggaatggataataaaaaactaagtcaaagcaaaacacacaaatttaagaaacagtgaaacgcatggtgtttcctaggtgatatacttttctgtgctggtggaccctctgtagatgacttaaaatgttatctctatttcccattttgattttgaaacctgtaataataatgataatacttaccctaaaactaatattttctttagataaaatttttacccatcattcataaattttgacagtaatgtttatttaaaaatagagggaaaaaagtttaaataaccaaatatgaaaaaaattcttttcaatattatcttactatattctagtccagtggttctcaaactttagtttacataagatattcttcggatttttgttaaaattcaaatttctgagctccattattaatgggtatggaatggaactcaggcatcctgagttgtagctggcccacatacttcagaaaactcgactttagttgattattatatgtcggaatcagccaagggcttttaaaatacacagattcctaggttctactcccacatatctaaaattggagtctctagactggtatttgggcttccatattttgcaaaaactacaccaaagatcctagtaatattgcaaggtttgagaatcattactcttgtttctagggtatattgttaaaatatatttactgtcacacctgaatttatcctcatctctcacattattccttaactaaacataatcttactttatgtaggaggccagagttgatactgctatataagaaaagtttaggcttgaaaaccgattagaactcttgtcctataatgctaaaattaaggaagcgagatattgctaagcacctttcacacaaactgtttaatttaatctttgcatacaacaactttgttgcatacactggttttctgcctatgttttagatgaaaaaactgaagcttacagaaaaaattgccaaattcacacagctgctaagagtcaaagccaagatttagtctctgttctttctattacatcctattatattttttcctcattcagtaaatctttaccaggttcccattgtgttaaatgataatgtctaacttttggcaccacattagcccctgacatgctatcataattgttgcttagaccatgtaaattgagttttgaaaaaatttttctattgcaaaatggtttttagctggatgtagaattcatgggttctcaatggtcagaaggggtctaaattgtagtgataattatagttaatgaattgttaaggaacttcgcctatgggatctcttaaccaccatgcctttgctatgaagtatttcttaaccctatttaaagatgaggaaagaaagatttagaatggttaagtggtttaccgaagattgcagatctagtaagtggcagaactgggattgaattctggttcactctaattttcacagcaaagttaaccagtagtatatacaatttctgactctgctttgcagttattcagaatcaggctgttcctccatttgttgagccactaaatgctaattaaactttgtgggatttaagtttgtttcctttgtagggaacaaaccagtttgccacacttaatcagtccagtaatttcttaaatcttgtaaagtttggaattgataatgcataatcctctagggaaatcagttgaagtgaataatcttttgtttatatttatatttgagagttaaaactcttggatgggacagattatttgaaggaaaattccaattttacctattatgacacgctgtgaaacacaacaatttcatggcatatccattgttattggtcttaaaatatttggtttgcatttaaatttcaatgaaagtgttaacagcatcaatgcctcagtgcttcataacatctaaaaactgactcttgagcattcctgatgttcttgtctgaaaaaaacaatgcctcatagtataaaatgacagcacatgtatgcaaacttgtacaatttctcacttatcctgtatggatagctaaaaatgtaatttttatattttttaaatatttaataatatgcaaattattgatatgcagtaaaatgcagtaagggcagtcacaatttaaaagagctctaaaatatatcctttagttgtgaaaataatcatgattttgtaaatttagatatgtgtacacttttgggatattcttaacacctctctatgtattaaaaggttcattttttttaaaggaagacccacaaaatctctaaccagggttatggtcttgtctttagcagacttacaagtttattggaaatttggggttatatttcaattttcttctctaagagtggtcttttctcaaatggcattcttttagaatactgtcagagaagagagaagaatgaaaacccaaagtgaagaactttacctatactcctttttcagatgtagaaattaaaacatgattttgtagaacgtcccctttagcagcagagcatgaattggaaaatttggtcagtgatttatttaggctccacaggaaaaatcctgtagggcattttttgaatatcctaaatttattttgatttgagaccagcttacagggcatgtctatcttaaaacagttctccattttcctgagaaaaattccagtggagctagttgtgggaggtggtatcccaacaatgaaccttttggggccaaataagcactttaacacaacttactccatccctttccttaaaccaaagtctgtcttgcccactgggcatgtttaactttgactgctaattttatttccctgcagaggcaaaggaggcaggaaaaaggagggaaaataactgatggcatgtgggtgaggttttgtccaggaaataatttttaaaagatcctagccagtatagggatgcaggaagcagttggtgcctgaaactatattacccttgcatcacagattaagaagtaggagccagttgaagttaaataacttgcctacagttacacagcagttttcagtgttggggttggtactgggaactaggttattcattgctccagtgaggaaattggacaatccagcttttttgctgataaagatgctctcctaatatccctactcacgttttctttccttcttttctttggctactgtcttttaacatctaaaaaagtattctgctgataatctcaggtgtagaggctagttattaaatatatttagacttttaaaaccattagaattagctgagctgtaaggacagtgtccaccacgtgaagcctttttttctctattttatttggatcatgtaagtaatgaagatataactggaaaaaggaaatgtcattgaataaatagttctgagctcatggcagagttctaaacgtgaaaaatgtaatggacacctatttaaagacaggccatttttatttttacctcctaattacagttaatctgaggtatttgaaatgaacataagctaaattttgataccttttcctcctaaattgatatcattagatggatttaagttggaaaggaggaccatggtagaaatacgaatcagaattttagacttccataaagtttataactgtcccagttagcctctgtgcttgaaccccaggggaaagttgctatttggccctagtatcaccctaagttgtgaatatgttttggatcaacttctcactgatatgataaatatttgacttaaaaattagtgaaaactttttaatgtggtatctgttgaatattaccatttaccccttagtgtccttagtaaggttctagataccaaacaatttctactagaatgtgagttttactcggttaccagagctgactaactgaatatgcaacagaacttagaagtgatgccatcgcatcagacatagtacaaacacagactagtgcactacagatcctctaaattttgatttggaaatatatgaattattcagagatccaaaaccccagagaaaatcaggtagaggaccttcatataaacacacccatagcctgtattccattctaagaattgcagtttgaaccaatagaagcccgaagcagctacacacatttgatttacaactgtgtcctgtctacttgcaaatagcagctagtttccttgtagggttggctgacaaggctgttgttttttttatatattattaagagtcaatagcagcagcacatgcaggctaattgttagaatataaagctttgttggaggtggaacatagggttctagtaatactcttaaattcacaccaattgacacaaaataaatacggttctctaagaaatatagaaggcttaaactagaaatgactgaaaaataccattttcacaagcatttagctatttccacctccaaaaaagtagtttttactttatctatatcttcataagcctttaaggtgaaagatgaatgacagcaacaaaatgacagtgacctaaaagcataaaattgtagttagtttaggtaatcccggggacaaatataatccagggtatttattagtgagataaaaggggaaagaaatgctgtgctttcatcatactgcaaataaaatgcttaattaaaatgccctaccaaagtaaacaacttatttctaagaaattactgctgaagaaattaagactaaaaaatagagaaagaaatacaacgcccgtttttgtacatttttcttatatttaggtgcttttaaaaattgtttttatgaactcctaaatttgagtgcaagggagatgggattacattaattgccatttaaatactcagcttcatgtttgtaggcatctttctgaaccagaacaaaaagaccataaaaaaatttctagtgtggaaatcatatttcatgtggtgaaatagaaactcaagaaatttcctgatataataagcttgagagtgattaccaaagaaacaaaagtttcttatcactcggcctgaggcaaatgtggcatattaagcttaaaatgaattctcttttcctgaatgcacacaactcttattaatgtcttggaaattatgcccaaataagattttctggatacatttgaaaaagcatccactggggtttaaggactattttatgtctatggacattttagtgtttagccacaaattagtttttgctcttttacctctttcttaggtttaactttagatgaaatgacttgtttttatcttaaaagaggcctttcctttagtgagagttaggttccctggtggcctgaaagagttaatgcagtttccaagagtgtccaacttacttccagggagtagtgtgtgcatgtgagagagtctggctccaggatatttgttcacatcccaaaaccaatttggcacaacttaaaatgtctgctaggcagaggattcagtgttgttaggccacgcaattagtgctttatttcatgagcaccaaattcacccaatagtgttttgatttaaggaagagcttgaaattcacaataacgggtttcatttatcagagccatatgggactcaacatctttggatatatttgtaaggctttcacaaagaagactttttagacatctcagatttcaccgattggagggcaatctggatgaatatctttttttggaaaagatgaactatcgttttcacatgtagtctccaatttcagtattccttgagaagctcaaaacaacaacaacaacaacaacaaaacaaaacaggaaagcgttaagtaagtctcagcttattagcttttactggaaaataaagaccatgattcttagatctggttcagaatgccaagtgaatctttgatgttgaaatttggccacctaatctttgcagtttgtgatggggcatttatgaaagagaaggtgggttctaagtctcaacatatttgtgcactttttgctagttcggtcttggtcatatgtcagtggattcttgggacgctttctgcagcatagctaactgattaacatgatgatactttttatatttactcaagattatttctttgttcactcctgattttccataattttctgatcattagggatctatcttaatgcaaagtattcttgaagatgttaatataaattaatcttttaaaaaaacaaatctcatatttttccactgatctgttaatttagatattaaaaaaacagattgaccttcatttggcaattgttgttaatactttaatttttggttcacagattttgtttagtgggctataaatggcctataaacaaatatttcagtgtttactaattaaaaatcagtattttttttaagcatagagtgctattgtgttatgagacaggcaaccactaattctgttaggttttcaactttttattttcttagttctctagtcttttttttttttttttttggcactcttcatgcagtatggtaagcctggttaagtcagaatatttacaagtagtaaatattactgtgacagttgctacttacctatacaaagtctatgtaaacatcgtaaggatgataattttaatttgtaaattgttatggtaaactggaaattacttgaaataactcttgctcatctttaaataccattttattgcatctaacattattttactatcctttattaaaaaaacttttaacactttattagctaatagtgcttatattagcaagttttagttttcacagacaatatccactaaactttgttcagttatgagcatgttgaataatactaaattaaaacaaaatacagtatattcttggttaccatttacattttatattaataccaatgtcatatattttaatgctatttcaaaaatatttagaaaccctctctctgctccctaccatttcttctccaatatatatcctactctacagagagagcacttaggaatttgttatgtagcccatctctatcatgcacacctatattgctatgggtcattgacccctatgctataggccaatgagcctgctggacaataggtagaaaattggaattatagcatgagctataattatagcttaactgcttaaatcaacttaacatgaattgtgctgaatggctgaatatattctttctatatttattttgtagtcaaatgttctaaaataactttctataaaaagtataatactcttaggtttaagttttattattcacctttgtttacaaacataggtattgtaatccaatgagggtaagtgttttcatcactgaaaatttcattatggaatacagacttttttggtattttctttgtgaaacagtatagtttgatggcaacaaggaaattaaagatggcagaaagactatatagatatagtggtatctaataagactttggatttataaactctaggctgtgaggagaagatgggcacatggattgaaaaagaaaatgtggatgcgatgatcaatggttattctttaataatattcctaatgaaggacatatgatgaggcaaagaagaatacaaattgatggagtatatgtatgaatgataaaatagttgtatgctgagagaaggagattgtgaagcaaagagataagagttatatgtagctttgtggctataattgccttggtttttgcatttaccttgagtttccattgtaggtattaatggctcctgtatataatgttcttagtataagtagaatccataaagcatttggtttgagcaggaatatttatttgcttgtgaggatagacctgtttgactttgaaatgtagtgtgctattaccttatggtcagagtaaagtttatattgtttttattcaaattacaatatgagtatatttaagaggagcagatatgtgtgtgtttgtgcatgtgtgtgcatgtacacacatgtaaggaaggacattttcatttctgtatatttctcctgtgtttgctgctttttgcttgccagtttttctttgtctctatcattttatcactgaaaccatctgtgtagaaaatagtatgcttggttttatcattttaaattgttttctatttttgttattttgtcctcccaacttgttttcaccttaagtattcaggctcaagtataaggcattttagttttcacattcaagaggtgtttctgctttctttcccgtccgtttgtccatatgtttactggtttctgataggctgtgcagtgagacagcagtttactatctgtgtgtgtgtgaaattagctaattggtgttagcagaaatattttcacatgttttataagcaaagtgcagcaaggtatataaatgtagatatgatccagacacgcgcacactcacgactgtcactgctcatgcataggcgctcagaagtaattaatgttaataagattttaatgtgcttgtgagatcataatgaggagaaatgaatgctctgattaggaaaaggtaactgtgtgtgtgttttggcttagaacaagatttcaatttttataaaccgcaattttagaacttgtttgtgattgcatcaattggtttttattttcaaattagaggtctgtttagccatttgaatgattaaccaaataaatgggtgaaaccctgatcataaggaatagtgcaggtttttcatttgcaaggcagtgttagtatacagcaaggctgtgatgtcttttgccaatgtgccattttaatgttgtttttttaaaagaagcttttccagaagccacttgtgaatatagtatttatttttataaatgtagatgctatctatacgttccagagacaccaatcagacactgtaactattgtgtctgagatacattcctgccagtcagtgatggtgtattccgtgtctaaagaatctatatcatgcttctcaaaatgtttatttggaaatgtagcactaccaatatttttattcataaatataatctttacaaattttagaagcttgatatattttatggtgaagtcaaacatttcaaggtaagtaaagatctgtctgataatagatttgaaggcaatgcagtcaacagctatattatagactggcttaaatccagctggacaccaggggtccttctccacaacaaattttctgaaaatattgtttacagagctttgacatacatttgcattattattattttttaattatagtataaatctaaatatctattaagggcccttgccctctagcacatagaaattacttatgcatttttaaatataaattgtggattgagatattcaaggattgtaatccttcttaaaaagtaagcagcatcgtactgaaatgcaaggaaaagtcttagatatgaactggatataggatagtgtagtttatttccaaccaaaccctacagatgtgtgttttaggctcttttaggttttggttatattactgtgatctttctgctggggtttaaaaatgatgatgaaggaagagaaactgttaaagtttgttctactcaacaattttgagatttatgtgattcccagggttgttttagatattgctttacatagaatccagagaatgatgattatttgataaaaagaggtatttgcctttaatacccagttgtttagttgactttcttggatattatcacattgaagcataattagaaacagttttcccagtgccagtttgtaagggaattcatcaatgtttcttctagtacttgcatgatatcctatagtaagtttttctatacagtcagatgtatttctatattcttctattctgtgccattgacctgtctatgcatgtgatattatcacattattttaattatagaagctttataacttgtttttatatctgaaatgttagcttccctccctgcttctaccattactctttttcagtgttttctggcttttcttgcatacttgttattccaagtgaactttataatcaactagcagatcttgaggaaaaagaaaatccctgatggcatttctattgaaattataaggaatttatgaattaacatcacaacaattaatgttcttatgagggtgaatctttttatccaagaatctgttttttatttccatttgctcagtaactgttgtatcttgctgaaatgttctaattttccttttggctttaggtttaaacatttattattaagtctgccttttggtattgcatccacttatttatttacttgcttactttcttacagccttactatactaaacaggctcttttcttctatattttctagctggcatttgtttctgtgtaggaaggctgttgatttttgtatgttaactttatagtctcctattttgcaaaattttcttattgtttgtggtagcccaaggtggatttgagttccccttctagtacaatgtttgatctttgtaagaccatggacagcttattctgagtgtcttagtcaatttgggctgctgtaacctcacagttctggaggctggaagtccaagatcagagtgccagcacggttgagttctggtgaagaccttcttctgggctgcagactgctaactcttcattgtgtttctggtagaaagagatcaagctagctcttgggggtctcttttataagagtactaatcccataaacctcatgactttatctaatcccagttacctctcaaaagccccatctgctagtggcattacattgggggtatagtttcaacatataaatttgggcatgaacattcagtttgtaacactgagctattttcctcatctgtaaaatgcagataagaaagccaaactagaatgatggagaataaataagatcatatcgtaaacacctaatattttccccagcacattgtaggcactctatttctagtatccattaataatgtaatgtaatgtaatgcaatatgtcacttgagcaattatttttaaagtatggataatatgcaattgaattattgaaggtttagcatatcagggtttttacgaagaatggagtgaattaaattaatgaacagaacttaaacttcttgataaacatttgtgatttaagactctaggggcagggcgcagtggctcacacttgtaatccctgcactttgggaggccaaggtgggtggatcacttgaggtcaggagttcgagaccagcctggactggacaacatggtgaaaccccatctctaccaataatacaaaaattacctgggtgtggtggcaggcaactgcaattccagctactcaggaggctgaggcaggagaatcgcttgaacccaggaggcggaggatgcagtgagctgagattgcaccactgcactccagcctgggtgacagagggagactctgtctctaaataaataaataaataaataaataaataagaaagacttgaggaactgaagattaattctgagattatgatattttgtagctatgcgcacatatttccattacttctgttttaattatgattattgcatgtaatactcattagccctggagagtaagtggaaacttcttgaacatctagagtgattattcaaggcaattcatacagtgtgttgattctagcacttgttattgtgccctacctcaagaatctgacaactttaccatattttcttagtgaacagtgtactaacttgtaaataagtttatgtggaataaatattaaacatatgtgaactcatgatggtatcagtataaacagaataatagtgattgtcagccctttatataactttttttataaagttggtgaaaacgctaattgaaaaaaatgtagttcatgtattatagcagtccaataacttttaagcttcaactctaataaaatggttattcactttacattcttttaattcacttgatacaatctattgttaaagaaaaggaatatcaaaatttcagggttcaacttttttttacctcatggttgttgtgaggaccaggtgagatgattaacataaaagacctaataaggtgccgagctcttgataggtgtttgagaaaatgttagttgttttcatttctattatcttgttattaccattgctggtttcttcattcccaactacctcaacccccatatcatctaccccactctctctctcactcttcatatatatatatatatatatatatatacacacacacacacacacacatattcttactgataatgttgttctatacttagactaaaatgtatgaaatatgtgccataatggtcattaagaatagacataaaataatcgtctgtaattttccaatattgaagttagctaagagtgaagatcctatgagtgaaacatgtgaaaactttagttacttgtggataaaatttctgaggagttgtgaggatgaagaataatttctcataaagaattttaggcacactttatatatagtttatggtttaccagagttctggcttagcactcagtgtgattattcctccatagcttcatattgctcttttattcattcattcatatcaaaaacaacatagaatatctattagcaataacatgttgttctagatagtgtgagatatacaaataacaagattagttatatgaattgtctctatatttaagaagtctattaggtgattcagatagggaagcaatgaggttatgtgcatggactttggagccagattttctgttttgaattcctgctctgaaactcactagttatttcacttcaggcaagttatttagcctgggtttcagtttccttatctacaaattgaggctaaaagtagtacctattgggttgtcctgaggattaaatgatttggtacaagtgcatcatttagagaaataccgtggtaagctcttttcaagatactaattttagtttcttttgataaatacctaaaagtgagaattctgaattgtataacagttctatttttaattttttgaggaaacttcagactatcttccatagtgcttcaccattttgcattcctaccaacagtgtacaaggattcaaatttctctacatcctcatcaacacttgtcttttgttttattaataacagccctgacaggtgtgaggcaattcctcattgtggttgtaatttgaattactctgatgatgataagtgatgttaaatatttttaaatatatctcttggccatttgtatgtctactttaaataaatctttattcaagtgtctcttagtctgggctgctctaaggaaatacagggtaatttatgaacaacagaaatttattactcgtagttctggaggctggaaagtccaaggtcaaggcactggcagtttttgtatctggtaagggcctcttcttcatagatggtggcctctgtgcccacacattgtggaagggcaaacagctcatcatctctttttaaaattactagtcccattcatgagtgatctgccttcatgatttaatcacctcctaaaagccctgcttcttaatactatcacattgcaattaagtttcaacgtatgaatttgggggaggggtaatattcagaccttagcaaattccttagtgcattattaaaagttggattattagttttttttttctttttgctcttaaattataggagttcttcatgtattttggatattaaccccttatcagatatatcagggaattcacccctgctcgccacgccccaggctgcagaccagtaatggtccctggcctgttaggaactggactgcccagcaggaggtgagtgtccggccagtgagcattaccgcctgagctctgcatccagtcagatcagcagtggcatgagattctcatgggagtgtgaaccctattgcgaactgtgcatgcaagggatctagattgtggacttcttataaggctctaactaatgcttgaggatctgagagggaacagtttcatcccaaaaccatcctcctgtccttggataaattgtcttccacaaaaccagttcctggtgccagaaaggttgggaatcactgagatataaggtttgtagatattttcttctattccataggttgccttttcactatgttgtttgctgtgcagtcaagatgtatagtcttacctgtttatttttatttttgttgcctgtacttttgatgttacagccatgaaattattactatgatgaatgttatgaagcttttcctgtatgttttattctaaaagttttagtttcaggtcttacatttaagtctttaatcgatgttgagtttatttttgtgtatgttgtaagataaaggtccaattttattattttgctgtttttcccagaaccatttgttgacgagactatccttttctcattgtgtattcttgacacccttgtaaaaaattagttgaccatttatgtgtagatttatttcttggctctatattttgtttcatttgtctatatatctatctttatgccagaaccatattgttttgattatttttgttttgtaatatattttgaagcaataaaatgtgatgcctcaatctttgtttttctttctcaagatcgatttggctattcatggtatttgtggttccatgtgaattacagaaatgtagaattgactctatagatcactttgggtatggacattttaacaatattaaagtcttccaatccatgaacacaggatatcttccatcttgaatttctttcatcaatgttttgtagttttcagtatataatctttaatctccttaattgtcttcctattttatacttcttggtgctattttagatgggaatgtttttccaattttttttcagatggttccttgttaatatatagaaatgcagctgattttgtctgttgattttgtgtcctacaactctattgaattcatttattaattctaacagttttttaatggagtctttaggattttctgtatataaaagcatagactctaccaactagacaattttactttttcctttacaatttgaatggcttttgtttctttttctttcctaattgccctgggtaagacttccagtactatgtagaatagaagtgccgagagtgaacatccttgctgtgttgctgattttagaggaatagctttcagttttttccattgaaaactgatatgtagccttttcatatatgtgcctatcatgttgatgtactttacttctgttggtactttgttgtttatctaaaggaattgaaatcgggatctcaaaaagattagcaatgaccaagatgtggaaacaacctaaatgtccttctatggatgaatggataaggaaaatggtatatatacacagtggaatattattcagtctttaaaaaagaggaaatactgcaatgagacaacatggctaaaacttgaggacactgtgctaattgaaatgagccagtcatagaaagacagatactacatgattccacttatatgaagtatctaaaataattaaattcatagaatcaaggaatagaatgatggtggttgccaagggctgaaggaaagggaaaatgggaagttactaattaatggacataaagtttcagttaagcagatgaataagttctagagatcttctgtatagcattgtacctgtagtcaacaatactgcacacttaaaaatattgtactattaaaatttgctaagagggtagatctcattttaagtgttcttactaacataaaataatgtagtaaggcttcaataaatgttaattcacattaaaattattattaaatatagcaggaaagttaatgttatataaccgtaaacacaaagtaatacagtatttagaggatggtaatatctttactgtgactgggaacagttgggatcggggagattcactgaatgcattagtatttaaattttgaagtatgatttctatagtgtaaaagaaaaaataaaaaggtagaggtgagtaaaaattaaaacttctggggactttgcagtcagaaaggttcctatcagaggcccagctccactcctcactattagtgtgaccctagataaaacaatctctgttaggattctacctccctgagtcatggtctgataactctctcaagacagcatactacagcaatagcaggaataaccttgttaatttccttttctcagcaattgctgtgctgtgcctgttgtgcaatgtctgcaagcaaatattttatatattttgtttagatttttagttgtttaaggcaggaggtgtatgctatttctgttacttcatcattttcagaagcagaaaaccaacatatttctattttacttttcaatgagttgggacttactgtctaattctagtagcacagtgtagttagttaccttttttgtactaactaaatggcagtacaagttttagtttacttacctgcttccttactaaactggcttctttgagaacaggtactgtgttgagctcatctttgtcaccactaccaacccactatcaagtttggagtctggaacctatcaggcagttaatgaataccttttacatttatttaattactgttaattgtagttctgtgccacactgtgaaagactgaatgctatgcttagagatacattttattctgtaaacaatctaaggtttttgaggaggtgagggaaattctttgagcctttctttttaatagaaggtaattcttgaagcataaatatggatgaaagaggtaagaggctgaaaataattagattatttaggattctaggctataatagtggaaataaagaattgacaggatctagtgattgattggatgggcattgctgaaaggaaaggtgagaaaaatgacttagattttcactaattatggaccaattgttttagaatgaaatagtagggatttttttggtcttcagaacttatgtggaagattttagcataaaattttgggagcaaagtttcataatgcaaagtagtaattaatggtagggatttatttagtttatttactagaattaagtttgaatttaaaatattttataattcttagggaaaggtttattttgagttaaattttattgtatacggttaatttttaattatattataaatatctccttatatacaattttttctcattataatctcttatctttgtttatagttataaatatttttaatttccctatgctttctttagtctttagaattctttggtaatgaacttagagctaaaagttaattttgtgccattgaatggtacagcacttgtagcatgacctagggtgagagtcattttttctcaaatatattttaacgttgcttttgtagtatgagttttcattcaaattattttctctttttgagagaggttggaagagcttctgagcaagtggatggtaggagtcgggaataagaaatatcagaacaattagggaaaccctccaatgccaaagatttatctgtaaaacatcgtatattagtagccatttgaaaagttaaaacacttttaacaagaacttatttacagtagtttgaagtagattatttagaacaaacaagttgaatacatggaaaagaaatatttctcccaattagttattttcactttgacataatcttttgaggaagcaatgcttttcttaaactgtgttctaacctgaaataaatgacagaatgtttgaatcaatgacagcatcctgacaggataggggaatatttttgatactgtgttccagttctcatttcagtttcttacatgaactatttgttactcctgttatagaaaatgacactgataatgactgacatttattgaatcaccccttgtgcttataactaaactgtgaggtaaatattatcttattattcttcacaacaatctcataagacagatattattttcatttgaccaatgaggaatctaaggctaaatgagattaaataacttccacaaagtcacgcatctggttatgcagagttcatatgagtcattgatgtaattggtagaaatgattgccaagtctattgtgtgtactgttaagggcaatgaaaagagcctttcacgtttatcctgtaaacagaggaaggtgagctttttggaacagtagtggagaagggccagagagggagagccagtgttctttttagattgctatgaatgagtgaacttaatcagaaaaggccgatgccccagtgcagcattgtctttcaaaactttaggtgctgcttttgaccctctttaaacatggatatccaaggcagcttaagagttggattatgcgttgctgtgaccaactgaggggccaagagcaatggcagctgtatggcaggttcttatgactcttaattctatttggagcacttcctgtgggcaaactcttacctgacacagctattcgagatccttagaacccatgagacctgatgccatgcaatgagtattccgtcagttacatcactgagacctcaaagtctgtgatcttaaccagcatgctacttggtataacaagcatatttattattcattgtatctacatcaattacagaaaagcccaatacctattcttccatacagttttaaactctggggtgatatagagcttcaactcggaggaaaaaataatcaattatataatatggtctcttatgaatgggaaaccctcaaaactgtataaccaattagaaattattcaaatttcttttactcgcaagaatgtttaaatgtgggtgaattgcagagataaaagaaataaaccctgatatttctcaagttctgccataaagaagtctagtttattgccttagtttcaaaagaatagttttctaagtatttcaaaatgtccggctggctgccccttccattctctttggaagcttctttgtcatcctcgtggcacatccctctggcatgcatgaccagctgcaagctaaaccctgtggaataagaattctttcatccctttgtgtgatgtgtttcattttcagagtttggatgatcctcttcggcagcagcagcaggcattgttagtttcaataggctgcctggatgcacaagaacagtcatcatagagagacaggctctcagggtccgtcccttcatgtcatggtgctgtgttagatcactttcctctgctggattaatggtcagagaaaaagggaaacaaactgtacccaaaggaatccaattaaagcacttgaacttcactgacgtctatcctattgttttcttaacttcctaacctatggttaattattctgaccagtggaaagaaacagcataaacatgggaattatcttaaattccctactttgtttagtttgtaaaggcatcaaaattttactgtgcaggatggaatactaatttggtatagttgaaattttttttggctaatctttctatttcttctttactctcctcaccaaaggcactgccaggacttaccgtacaacactccttggcttctggaattttatctctgctcacagtctacattacaacattagttcattctgggcactttagcttccttgaatctccagttgatctcacacccatgcctatgatattcttctcctggttaatcaagaattctctatttctgctccgtcatccatgccactgtaagtaggaaagtaatttaggcttttgaatcacagccttgtcatttgtgaaatgacttcccttgactctgaaattctctgtccaaaatataagctaggatttccagtaataacaatttatatgtataagatgattgatagtttgcagagtgtctttatatattttattttatataattctgactacagttttgtgaggagagaaccattattattatcttttttttttcagaaaaggatactatagctcagtgaggtgaattgatttactccatcacataagtagtaactgcccgaacctgaactttaaattcagttttccccaccaagaggtgatggttttctctagtagggagaaagtttctttcttaaaaccttaatttctttattaattttaaaagttttttttattttttatgtgagtatatatgtttatgctttgggtaggagtcttcttatgctgaattgagtttggggtggaattttgtgctcttagtttttgtcagtgaagaagtctcctacaatttctaattaaagaaagataagaaggaatgtattacttttctagtgtagaattttggtatcattgtgaacctccctgctaaatttgtttgtatttttccatggtaaatccattcttccagaaagctaatatacctattaaatagtattgtttataattaggaaatggtaggtatacagtagactccctcttaggttattcctgcttctggccaacagaatactctgaaaaaatggtgtgtttctgttcatctgtttacctgctgccatgcttatctacagtcatttgtgtttgtttttgaatttgtttatgccaaatgaatgtgcaattgtaatttaattatgcaaactgataaaatatgagttcaaaaatataaagagttgttgattttatgaaatttaagttggtgctttggaaagactttttaaaggtgagttgctaaaacaaattgcagtttaaaaaggtgtgggctagacaactgtgaaagattgcctgaggtaggggtgaaaaaatgtaaaaagctggaaggatccctcattcagtttgctttccaagtacctttaagctgtcattgagtttaaataaaccaaaacaggaaatcataggtgatacatcatggtgtagtttaagcaagaaggaaaacatgaaactttatatagcagatcaagagtcagtgacagccattggtcctacatcaaagggttagtaaataatttcatgttttaactttaaataagttaaatatgttaaaatcaatttattcagtttctttctgtatctcaatgtccttttgtgtaaaatgaaaatgaaaataactttacccaagaatatttttttttttttgtatatgaggattaaatgagatgtatagtacatagagcaatgcttggtacaagtaacatactaaaaaaagttagccatcatcattatcaatgacaatctgagatcatctgttgtagtgtttatgtatacttatattacaaatataatgttatggatcattgctgccagctattggaatattttagcagcaacacatactagttctgtttaggttagcagagacattctgtccattttctacctccaacctacctttttttctcaggatttatgagaagagcaagtttgatggtaactacctatgtcagtacgtgctgagacctgagatcacatgtgtgacataagtaaaagcgctatgtgtagtctcaactgaatcctatcagaaagcttgggatatggagagttcgtggcatattagtggaggtgtgtggaatgcttacacagtactcacccacactgaacctagatctagccaacgtgtttctgacttaaacgaacactcagcttcacacagttctctcccgattgaaaacagaggaaacaaaggaaaaagaaacaaaagtcgtgacaaaaaagactgttagctaagctagaatagttgtgtggtagtagaacactgattctaatagttggcattgtactgtatgccttccattcctaaatgcttctgctgactgctaggttgtaagttttcattaatgaatccacatttagaaactgctttttttggaggagaattaagcttttacctgctttctttctgaatgctggggcacatatttttgtgtaatttcatatcctgttttcctccctaagcatgtgctctttgtagaaaagagactcacacttcagagtaggagacagcatcaagactgctgaaagtttcctcttggtttgaatgttatagtggttgattcagtgctggaggcataagaatgaatgcactatcaaactgtcaacttttttttttttcaaacaagcaatgcaatactatctacagtgatttacatggcatttttctaattttttaaaaaataaagcaagtaggtagcaaagtggaatttgaaacattttcccaagttgaaaaaaatttaaatggtataatctaaagttaagtgcccagttgctttcttaaatattataagtatcactattggtcactttcggggcctataatggaaattaggtctatttgttcttcagattatagtctatctttacctgtcgtgaagcttttggataaaagaaatacaatcattctatatcgtgccttatcatggcattggaatttccacagttcattcctatctatgaatattattcaagtttcttctctactctttcttgtgcttttatttcagtcattacaaattctatcaatttcaactgtcctcagccttttgccctcagatgtgtattcttcatatattttctttattctgctgtgtgtcatcattttgttaacatgtatcctttttaacctatactgtttattctttagttggttgatttaaatttcacccattttgtctctttaggtataccatttccatacagttattttacatgaagacaacagtaaaacataaaaagtaggcagcagcccagaaaatcgcagcctttatatactatacaatacatactatttatataatgggttaggtattcaggcttctatctagtagggatctacacatcatactcttctgttaaacctgatatttttaaggaggtaagatttaagaggatttccttctttatatgacatacctgtcagtcaacatgatattcagaacccattgttaagtacctttctaggcagagaaaagaaccagtttcagtttggatatgtttgaagtgctgtgttcttgactcatatgcctggattggcccagctccttgatattttacattttaagttgtggattaatgcatatctataactggtccaggatgtattgctaaacttgaggtgatgggttaatccaccactattgttttgctgcaacaataaaattgcggcaggctagcaagttagctttagtgcatattaatggcgagcatatcatggtacatgaagttgatacgatagaagaagtgtacaattcaagtgcatgtgcatgtgcaatgtttctgttctattttgcttagaagccagtttgaatatcattatagtggtataaaaggcagtaacttgatcagagttctaggtaagaaagtttttatttctctgtatcagagggatgtgctgtggaggacaatctgaagataagaataccaacaatagaatcatctttttttttttttttactgatttttcaaatagcatatgtctttctgttatgttgaaaattttcactgtgttatccattgaatgatttatatgcccaaataaagattagattgatgttccgtataaagatctgcagaaaaatgtgtgtatatatataaattttttaagaggcactcatgacatttgactaactcgatcaactataataataaatatcattgaattattggcctcatcaagtagtaggcaaataattgcttcccgggtttgtgggtgtgatattatttctaattttatttaatcatttactaattcactgtgcatctattatgttggggatagtatttggcatagtagggaatgtaaagatgattaagacacagtcctgtctactaaaagtgtgcagtctggtggtatggtatagtacatttcttagatttggcccttactataataatgtgttaattccttaattatttcacatgataagagtctaattattattgttatggtcatatttaatttacatcttcagtgttctgaataataatttaatgtactaccaacatatttaaacagactataatccctaaaagataaagataaaatattataaatataaatgtaaaatattatggtaaaagcactttaataattttaaatggttttaactggtttttaatcttttcactctcttttgttggattcctttatttgggagaagacaggggaagggacatttggcatttggtgttgaaaatccagtgtgaatagaaacccgagaggagacttttgattttctgatttctagttccataacatgcaaggtgaagagccacaggagatgaagatggagggataagtaggtgcctatcatgaagtgccttatatatgctatactaagaagtcagaaatgaggtgggatcctctgaagggttttaagtgaggaaatgacttcttagttctattgagaaaaagcacttcagcaattgagtgtggaagaaggggtatgaagaaagcagaccagagtctgtgagactgttagaagacaattaatggaaatcagggtgaagtatagtgagggcatgaactgaaacagtgactgtgaagctatgaggaacctaagaggaatggattcaagggatttttaggaagtagaattgataagatttgggtactgtatcggtgaaggggtggaagttggatgctgttaaagaaaaagagaagtttaggatgactctcaagatgtttttctcgagtacctgggtggtgccatttgcagaaaaaaaaaaggactattttaggagtaggaggttggtggccagccagaggtcaggaaggaattgagggtagaaacttaggaaagatataaaagattcatttgaatttcaaacacagatttaccttgctttgagaaaatatgatgtgattctgtaacctgaaagagtaaaagttaggataagtgtgttatgctgaagctgaataaggggaatgagtttcatgggagagtattgattagggaatttctactagtagaaaacaggatgtccagagtcaaatatttattcttggagacattttttcccagattttctttaatgacagctctcctccattttatatccaaaagctagattggcttattcaaatgtgttaaccctaggatgtgtctgggagtcttctgagtcactactttaaggggatatctatttgaggaggcactatggtaatgaaagcaagtcaaataccaaatgtatggattgctatttaaataaccttgcacaaaccacttaacctctttgggtttccattttctcacttttataaaataagagggttgaatcggatgatctctgataacctttttatagtaagagccctatgattttatgaccctgtgaatagcatgattatagctctaggattaacatcttcaggaaatttaacagcagacttccagttaaacttcgtgattgaacacatgtttttccatgttccttcctagtaagggactaaaaattttgagcaaaagactaaaaaatatataaatccacaggcataaggaagaggaagcaacatattaaagagacacaacttttggaagatgtaaaggaggaactggcagaaatgggaaagccgaatacatgtgactggagagtgttgtgtcaatgagaaacaagacagttcatactccagaacctgtttaagaattagaggcagtatgtcctgtagaaaacagtagctgaagtagaaataaagtataattaatatactcagagagatagcagaagatactgctactatgaaacatgacaagattatataaaaagaagaaataaccagagaataagcacttttataataactgaaataagcttttatatgatagaaattttcctgaaaatagagcaaaaaaaagtcaaataaatggaaaataggagagaagagataaaaatcaaacaaacgatccaacaagctgaacatctgattaatgggaagttcagaaggcaggcgagagcaaagaaaatgatagggaggaaactgttataaaagtatatggtaaaatttttcagccccaaaggttccagtttggaaggatcttctgagtgcccataaaaatgtgaaagcaattccacaccaagatgcataattggaaaatttcaaaataacagtaataaatagatgataatagaaagttcccgagagaaatataggcctcatacattggctcaagaaccagaatggtatctgatttcttaatgacaacattcaaagctagaagatgtggctttaaaattcagagagaaggccgggcacggtggctcacgcctgtaagtaatcccaacactttgggaggctgaggcaggtggatcacctgaggtcaggagctcgagaccagcctgaccaacatggtgaaacctcatctctaaaaaatttaaaactagctgggtgtgttggcacatgcctgtaatcctagctacttgggaggctgaggcaggagaatcacttgaacccgggaggcggaggttgcagtgagccaagattttgccattgcactccagcctgggaaacgagagcgaaattccgtctcaaaaaaaaaaaaaaaaaaaaaaaaagaattatgagagaaaattacttttaactttgaattctacacccaaactaccaattacgtataagggtagaaaaaacatttttatttttagacacatggttctccaaatgtacccccacacttgctttctccggaattgtttcaagggtatgctacgtccaagtgaggaaaaactgaggagaaaagaccaagatagagggttcaggaaacaggtgattaaaatgaggtgagaaaggtgaagggaagttactggataacttctgtgcattgatcttaaaaataagcagtctttacttgagctagaagatggagaactcccgaaagggatgtcttcaggggaaagaattagaataggattcttcatgtgtaagagtgtgaaatattatatttatagaggttttacatttctgttgcaaaccttgggaatgtggggggcaaagtgacaatattaacaataggaaggaaatattgttactactcaaggtaccaaatgtattcaaaaatattacttcactgattactggaaggatggaagaaagggaaatgaggtagtatcaaagaactaagtcttctgccatgataggaagttaatatattatgtctaaaatttataaataaaaataacaatagaagcatattatttagaaatcaggcaaacactagaatgagttttggcagagggtcaaagttttggatacgggatgctgtattttgtataaactttgtggtactatttaactggtaaactgtgtgtgtgtgtttgtgtgtgtgtgtgtgtgtgtgtgtgtgttgctttgacaataatgagaaatgataactaaaaattcttacagatttctaaatgctatgagctgaatgtttgtgtcacctcaaaattcatatattgaaaacctaatctttaatgtgatggcatttgtacatggggcctttggtaggtaattaggccatgaaggtggggccctcaagatgggaatagtgcccttatagaagcttgcttccactctgtctcttggccctccatcatgtgaggacgcagtgagaagactactatatgcaaaccaggacaaaggcattcatcaaaacctggtcatgctggcattctaatctcagacttctcagccctcagaactgtgagaaatacatttttgttgttaaattctgttgtttaaccaagtctatggcaatttattattattgcaccctgaactcagataccaagtattttggactttgattgttcaggtagtagattaactcatgatgaagtgtatatatttttgttatctgcaggaattagagttataccttgacattatatttgaaggggttttcgcatgctgtttgaatgataaaaacaatgatgaagaatctaaaagttgttgctacaattctgagaccttaaatatatgttacaaaatttaaaaaggcattaactattgatggctaaggagaaatagaaaaagacagataaactttcatttggtttggtaggtataatcataagacaaattaaacatagttgctttgttaaagaaagaatagtttcccttcattctaagtagtttttaaatacttaatatatttttccctcaaaaactttgcatggctagtgcatctattctcatggaatgtttttaactgtttgctgactcattagctattcatctgtagctaatatgaggcacttttgttgtggtttacaaaaatatggaggttatgtgatttggtgcatgcatttcagaatttagattgtcttttaataatcaaaaacatgctttgccaaaaatctagtatgagtgtgctcaaaatatcaagtgccttttgaatttttaaaataaaaacattccaacaataaaaacccaacagcaaacaaacaaaaaaccccagaacttgtcttgtaaacaaaagtgtttagcagatatccttaaacctccttgagagaatttttagacataagagaggcagaggcagagaccaagatagaaaggggggatatttctccttgaatttttcttttaaccaaggacatttggttttgggaggaaaagaaggagagaagaaatgaagaaagaacatgatttgtctcaaagatttattttataattgattgtagcttataaaggttttcattgatagtgtatgggagagagaattgtaagtttcaatgctgacactttgaagagttgccctgttattgcagctgcttaggcagccttgctcaaacatcaatggtgcattgtggcagtttgctctgcttccctgtttctgatggacgttctccaggcagtgaagggcaaaggggctggcaatgctggtaactggcataataggagttgttggatcagttttgagtgtatgtgtgtgaactgaacgtttaatgacaaattctgtgttatggttagtctaagctgagtatcagaatgtactttatgttcaattaatgtagattggattatatttttatattgtcattttatagcatagagtgcataatgtttagggtgcataatttgtagtggttggtaaaaaggaccaatgcttgctgcctgaacaaaaaaaattgaagatatactcagatataatcacactgaaatatttctgtcataaaataaataattgacttttactgttcataatattttattgtttttaaggatacccatattaaatagtttcagctgtttgtgaaaatgtgttctgattttttttggtctcttgtgtgtgtgtacaagaacactctaatttactcttgtaaaatcgtaaacttttagaagagatttgaaaagtcacctcagactgaatagatagaggcattacttgggagaatatgacataattttcagagatgacacagagaaggcagagatgatgaacaaatattttgcctatatttttctttccaagaagaataatcttcaaattagaagaaatgaatggaaatcaataaattggttaataggagactattttggcaaatttacaatctaagtccacagagtttggtaacttttattcaagaataataatgaccataatttttttaaaaacttgcatatttatataatgtgtgtttttcaaagtatcacaatgtatgtattcactgaatccttaagggaatcctgaaaagtaaacagggatgactatttgcattttgcaggtgaggaaaccaaaaggaagcaaataaaaagtttttagcagtaggcagtaggtcataccttttcacttattctcatttaataatcaccatgctccaagaaaattttattatctccatttatagatgtgttaactgaaagtaaatatatctttttcaagccacactgctgtctatcagaacaactggaatccaaacctaaggacttttgctccaaagtctaaactttctttgactgaacatcataacttccagaaatgatcatatttggagaatcggaagatataaaataatggatacaagcaaacatataaaatattaaagatgaaataaaggtgaattctctaacctacagagttaactttatctcctgcaaaattctgaaatattgaatagattatttgtgaccatgtagaaaccaaggtgttattttaccaagaacaagtcatgtcatactaatctcatttctccttttctgataaagttaactgggttgttagctaagaaaattttgcaaacatatgtatcttggtgtaaacaagggatttgataaaatgatggcagtagatttagggagattcataagttatttgaaaaacttcccccatatagtcatgtttaattttcttttctgaggcaagtatttgtgaatagcctactaaatacaaagcaatttactgtccactgtgggatatctttttgaaaaaagagagagtaaaacatggaagctcctttcaagaacttaattgcttagtatagaagctaagaagaaaaatataaatcacataaatgccctgtgatgagtatcttaagaaagaatcctctcagcatggatcccgggaaagccttcctgtagagatggcattttaactgaaatggaattacggatagggtttgcatataaagaaatagggaaaaggtttgcaagtgataacattagctcacattcattgactgtatattgtttcttttattcttcataatcattttgaggtagactatattattatttctacatggacatgataatatgaagtcaaagatgctttaagtataacttgctttataaactagttgggtcaggatttgaacttagacagtttaccatagatctcattctcttaaaaatagaatcaagaagatgggtgttaaaagaggttgtttgagtaatgatacaaagttaagcatggctaaaatataggtatgcccaaaggaagatagtaagtgaccttgtttgatcttgtcgtcttaaatagtattttatatatcagtggtttgggtgagaagataaggaattactatacaattttcaggttattcaaagatgaaacactgaataaattcaattcctgtattttatttcaaaatagtaacaacataaccagataccatataaaagacatggttcttgaaaataagccctgaaatttgtatgacataatagggagaggtatacacttaaaaataatatcttcttctgttgcatagaaaaaattttatgcttggatgtactttcctgatcataatgtacagaagggaaacctaaacagagcacagtgatcacactgagattaggagatagaaattgaaattcagggagatgaggcagtagaatttgcaggtagaataccggaggaagggagatatgcagacaaggaactttggaaatctgcaaaaggattgccttgagcctattgaatgctgaatattaaactgtgcatactttgggtaaacctccagaaggccggcaaagaacaaccagagagctgaaaaggtgaaccactcctggagctttcgcggattggaagtgtttgagttttgttcagccaaagtggagacactttgttaatagccagggaaatgagatcccaaaaaggataattctttttcagtagggcctaacaagcctgccctaatagagcttaagaataagactcaaaaggaccaaactgatctgcaagctattaaccagcctgccagaaaaatgtctaatactttgtgaagttcaacaaaattcagcagtcaacaacaaaaagtttatgatgaatgacatcaaaataaaatttatgttacatgaaaaagctggaaaatgtgacatgtaactgggaaaaaaattaccaatgaaaaaacgttcagaaatggcagagatgacggaattagaagaaaaatattttgtaaccattattataaatgtgatcaaggatttaaaggaaagcttgactatgatcaggagagaaatgagtggcataaaagggaactaaatggaacttttagagatgaaaaatatatttggaatgaaaaaatttactacattggtatggtataacaggatattagatactacagaaaaaggattagtgaatgtgaagacatagcaatagaaactatccaatctgaagcacacacacaatctgagaaaaaagattgaaacagacacacaaatataacctcagagatttatgggacactatgaagcagtttaacctgtatgttagtcctaaaaaggaggtggggaaggaaggaagaaaaattacttggacaatcaaaggctgaaatatatatatatggagtcttgctctgttgcccaggctggagtgcagtggcacatcgtggcttactgcaacctctgcctcctgggttcaagtgattctcctgcctcaacctcctgagtagctgggactacaagcaacccccaccttgcccggctaatttttgtatttctagtagagacagggttttgccatgttggccaggctggtctcaaactcctgacctcaagtgatctgcctgcctcagcctcccaaagtgctgtgattagaggcatgacccaccatgcctggccactgaaaatatttcaaatttgactaaaactgtatttacaaagatctagagatttcaactataagtaagaggagaaaaatgaaggaaatggcatcaagacacatgatactaaaattgttgaaaacaattgataacaagaaaatcccagaaagagacaggaaatggaggcattatgtacaggaggaagacacaaatattaaatacttcttgtcagaaacaatataaactagaagacttagaatttcattgatatgtttggctatgtccccacccaaatctcatcgggaattgtagttcccataatccccgtgttgtgggagggacccggtgggaggtaatttaatcacgggagtggttacctcatgctgttctcatgataatgagtgagttctcacaagatctgatggttttataaggggcttttcccccttttgctcagcacttcttgctgctgccatgtgaagaaggatgtgtttgcctcctcttccatcatgattgtaagtttcctgaggccaccccagctgtgctgaactgtgagtcaattaaattttttcttttataaattacccagtcttgagtatatctttattagcagcatgagaacggactaatatagacatctttaaaatgctgaaagataaaaagagtcaacctagaattctataaaataaagacttttggggacataaaagctgaaagagaaatcatcacccacagacaagcactacaagatgtgttaatggaggttcttcaggaagaaggaaaatgataccaaataagatggaaatttgtaataacacaaagtaaagaggagtaccagaaatggtaaatatatgagtaaatataacacacttttttcttttaaaattttatttaaaaggtaacactttgcagcaaaataattaacaatgtattgtgggttatatagtagtaagatgtttgacataaattacataaataattggagcagggaaatagaagtgtgttgttgaaatggtttgatattatatatgaagtggtatattattatttcaaggtagccttgataagttaaaagttacatattgtaaaccctacaataatcattacaaaataaagagatataacagtaaggccaaaatagagataaaatggaacattgaatactcaactatttcaaaaaaaggcagacaaagagaaaaaaaaataaagaacacatgggacagaaaagaaatacgaagttaaagttaatggatttaaactttcttatatcaataaatgcaatgacaaaaattgcaatcaataattgcaatgacagttgcaatagcagctcatccaccagaggtgttagagaagacagaaggataatgaaaaggggttaactgttttgactctataataattttgaaaattatgtttaagtaattagagtatgtagattatttttattctcaacagaatttatacaagcacatatattctggaatagatatgtgctacaacagaatgactccaactccttgaggctctcattagacacaaacctgttattgttaagtagctacatctcaatccatattttctggttaaataaagagagtacattattccttattctacttctttgctcttccttttctcatattaagcccaaacaccctataatgaaatatggataaccacttacataaatggtgtaccataaaattgagatggtaagatttgactattaaacaactaggtagctttatggtttattattttctggatataaacagaagatcctcctgatgctatccacataccctcacgcaatcattagtatagttcggtatttttaaaataacttttgaagagaagacactttttaaaatacaaaaatggcaacatataatacatattattctataagctaacttgttaaaatgcaaaaatatgaaagatgcttgtttttcaagtatttatgtgtatcagtgtccatgactctttgcaaatcatgtgtgacttttatgattatttctttaggataaaatcattgccaggttgcaggggcatgagggagcacatataaggttatgatacatattgccagaatactcttcaagaattctttacctctcacagggttgtgctagtttctctaccctctcatcgataataaacattttcagtctaagccaaggtaaaaagtgatacccatgactttttcattttgtatttcctttattttttgagcatctctttatatgtttactagtcatttgaactactgtgaaatttccattcacttacttgcatgtttttgttttattctgctgtaaaaaatgttttacacactcccatacatgcttatgtgtatctctcattattttgtaagactgtattttaaagatactcactttttgacatatataaaatattttcacccttttggcatttgacttctaacttttatatggaattatttactctaaagatgttttcaatttttatgtagtcatatctctcaactttttgagggtctttaccttggattatgccaaggaacatttttctaccccaaagctatgaaaatattcttagtgttttcttataatacgtttattgtactgttctctataattaatttcaattatctgtatttattttagtgtatgaatttcacttgctcagctaatgaagtaaacatgagccagcaaaagattatgaaacatggcaaacttctgagattgataatgatagttataatattaatagaaaaataaaaaatgacattcattgagcttttactgtcttctagggacagtgttttttatattctttatctttacaacaatgcgatatgttagatatttatatctctattatctcattgtaacggtgaagaaacagattcagtagttaacctggatttctcatagtgggtgtttgctatctattgtcatataacaaattaccacagacttagcagcttaaaacaacaaacatttatctcactatttctgtgggtcaggaatttgggacctgctttactgggtgcttctagttcagagcctcttgtaggttgcagtgaagatattgaccaggtcagtggtcatctaaagaataatctgtttccaaaatggattaatcctatggttcttggtaggaagtctcagtttctgaccacaaagtcctgtctgtagggctgcttgagtgtccttatgacatgacagttggtttcttccaaggctagtggacagtgagagagagagagagagagagagagagagagagagagattaccaggagggagcaaaagattgtaagttggagggagcaaaagtttgtaagttaaaattactctatggctatatatattagtgataatagaaagaagtccaagaaactgggacctgcattgtgtacatggctttgtctcaaggaacccctggaatgtttgtctgttgtcaggaaagcatggactcctataaaagttttgatttctataagaactcagacctgaggttgaagaccttctacatggattagcaggagaattgaggcaagtcctaacacttcttataattaatttctgcattttcctgatgcctgtaagtcactataagagtaaaatattgagtgtgaaaagcataaagagctaagaaaaatcaaaattattgcattacttttatgaatacatgtagggatcttaataatccctctatgggccaacctgggagccattcctagttttttatttgttttgtgatttataataatcaaagtgtcaaatcagttgattttgtattatctaagtaattgttgcttgcatgataaaggttaaccttaaatattcctcctgtttggcaaataattaattatgcattattaattttcacttgaactatgtagtcttagcctagagagactcaaaatagaacatgctgtagtgttctaatggaatacttgacggggaaaagatttgagtttgggttctaatgctgctactgagtaagtgcaaaaatgtgagataattcatacaatctctctaagcctaagttcttcatttttaatattaagacgttggttgtgaaacttacaaacttgctatgattcaaatagttgagcttaaattaaaaaagtttaaagaataattaaactggatgactattggttatttcagcgctttcctggaaatacaaatgaaaaggaacaacctatgttgaaagttgaaatggtgccttttattgctccctgtaaacagatcatttgatatttttatcacaataagaagtattttttcacagctatttctctatagtttgtttcttcataagtttagtcataggctttctgtcttgggtatgtgaaaagcattgtatatttcaatgcctcacatgttaaaattcagaatatttaattttacaaagcagaaattgactaatgggggacaatggattatgattatgcttacagagtaaagaactaatttaaacaatttaatatgaaagcccaatttaataggaattacaatcattagtagtttatgggagagttttttgcaatataatgataaaccaaccacagactaaacccagtaaaaactttgtaacatgtccttataccgacacattctgttgttttcatcctttttcctctttatttttctggatattatcatcttacatctcctagaagtttcattcagaatttaagtatcagacaggtttatagggcattcggataatataagcagagaacaaattatttgcaggtttcaatatggaaattcttaaattatagaaagaatatgtattctaatgaaagttgggatgaaatacagtagaatctcatcaataaatgtgagttaatatacacatacttaatttacacaaatttaaccatatgcattcatttaaaaaagaaatttttatcaaattattgagcaagtactctcactattccacttaaataagctcttgctgattagtgaactcaccaccctgagtgagattggagttatggttggcttccatccctgtttacttctcaggatgtgagcatcttgccattctgagtgattctaatatttgatgacaccaaaaaatacatagctttgacctaaaaccaattcagttactttatatggttctgaactgaaataaaaacaaaacaaagcaaaacaaacaaacaagaaactgttccaacgatgaaggataagaaaagctctgttggatttatagggagaagatttatagtctccaatgtgttacatcttttaaagggatagatcaaatgctttaaagtcgttatttctcatttggattcacaggaaaacaacataggctttgttttgtacttctttatctgtggttaacaatatttagttcagggggaattactgttcttgaaaggggagctaaaatggctaaaccacaacagagagagttataggcagtgatgtcagcattcagattagcctttactgtggactttactgaagagtacaaaaaactgaatgaccagagagtttgattagctataaacgttttttgaaattaattaaaaattcaattaaagaatgaaaattattattactaaaaacaattcaaacatgaaaatttttacagtgctcattttgcagtgatgggattctgaataattttatcttctgaaatttctagctttttgcattttctgagtctcctataatagcatttacagtttatagtgaaaattagatatacctcaaacattataacaaaactctcagtaatttaaatttatgatttcttaaattagctcacttttgtgtctgtgtgtgtgtttgtaggataatcagtgataggaatgaaaacttgacaagcttcttcctgaacaagatatttgtcttttagttaaactttgcaggaggaaagatgacgaatttccatttattagtgcaatataattataatctcatctctttaactctgtatttctttagtatacaagatagtactgtggtctagtcactttttttttttccatgagaaagcgtctcactccattacctaggttggagtgcaccggtgcaattttggctcactgcaacctccaactacctggttctagcgattctcctgcctcagcctcccgagtagctgggattacaggcatgcaccaccatgcccagctaatttttgtatttttagtagagacagggtttcaccatgttgtccaggattgtctggatctcctgaccttgtgatctgcccgcctccacctcctaaagtgctgggattacaggcatgagccaccatgcctaaccacacttttatctttagaaagttttattatatcattaaattgtggctaaagtctcatcaattaggatttcactgatatggttgggctctgtgtccccacccaaatctcatgttgtattttaatccccaatgttgggggagggacttgatgggaggtgatcagatcatgggtgcaaatttcccgcttgctgttctcatgatagtgagtgagttctcaccgagatctggttggttaaaagtgtgtagcacttccctcttcattttctctctcctgctcctccatagtaagccatgcttgcttccccttcacctttaagttttctgaggccccccaggcatgcttcctgtacagcctgtggaactattaagtcaattaatcctcttttcttcataaactacccaatcagaggtagttctttagagcagtgtgaaactggatgaagacagaaaatataattctaaatttatgataattggaaaaagaacttgctgaaatttgtcttacaaaacacgggtttgtcaaacacaaagatcctatggccagcatttctagaatgatttctcgccaatttaggaaaacaaactattttgaaggtattactgtaacaacgttaattcctgtcccaacaatttactaatcaacagctcttactacctatgaatacctatgtattcatttaaaaaagaacctcttaatattaatcctggtccctattagctttaatttgctagtctctaaactcctacccatctatcatatcagcttaaacatcactttctcagtgaaatcttcttaagcatgtcaattttttttcctcagatgctatcatggaatctcatttttctctccaaaatctatttatagttatataataattttatgattattgattaatgtctggttcccacaaggcattagtaatatgaaaacggaattgtgtctgcttttttcttctcattgtcaccataggaactaacatactacccaaaatatagtaggactttaatagtcatttaattattacctaaatgtctgaatgaattattgaatgaatgtacctagcaaaaaaatttagccaagataccttaagctttaagttttagtattataaaatttccgttaaatcattaataatttaaataacagcgttttggaatttctgagtataggaattgaagcttatacctgaaattgaagattgtgctaaaaaatgatagatcattattttaaaaacaatagtttgtaattttgtcctcctatgattttggattgactttgtttttctattgtttctaatagagttgtagagtacctttcatcttattaccatccttttattattacccttttctgtagggaaaactacacagtgatattttaaccatatgtccatatcagaggacatattgatcatagcctttaatcagaactgtcatctgcacataaaagtttcggtgaaaagttacctaagtttacatgccagttatgcctgtatgcgtgagatggtatgtgactgaatatttatggtagggattatagaaagtgaaataaaagttaataaatcattgagagattcagaggacccctaggaatgcatacattctttaaagtatcataatttataaaatgtattaaaattatttttatataaacaaacataaaggtgtttgataatataattctagttttgatttctaagatgaagagagcttaattcattcacttaatcatgtatttatcaaatgtcatacatgcccccaaataactctaagctaatgaattttatattttatcataaaaaaactcttttgaagggagctttagatatgagagacaaatatttacttataatttcatagcatatacataattataactaaagtcatataaaataatattttaatttactaatgttaattttcaatcctaactttatgaacgttttattcatattcgtcacatacatttataaaattcgtaccttttcaatgttttccgaaccacatcatttttggttttacctaagttattttagttataacatgttttaaattcatctttgatactgtcacttaaaatttcatcagaagacacaaataccatttccataacactaggggaatttttttcaacacttgttccttaagcatatatttacgatctgtactatgtaatgatataatcttttggctgttttatatgatgtttgaaaggcatatttaaatcagcagctaacatttgcaattgtgaaaaaaattccagaaataaaaactaaacttgtattacattttattttgcctctatttttaactattctagcagattgacctctaaagccatgacaaaccagtaccaactgaggtaattccttgctaataaatctttcctaaatactactttgttgtttataagaaagtaattggaagtgtggcccataatatgagagtctttcttctgagaaataacattgactaaacagtttgccttataccagttgaacatccataatctgaaaatctgaagtaaaatattccaaagtccaaaactttttgagcactgccatgatgccagaagtggaaaatttcacacctaacttcacttgagaggtgcacaaaattattataaaatattgtacaaaattaccttaaggctacgtatataaggtatatgtgaaacataaattttgtgtttagacttgggttctattgtaagaatatttcattatgtgtatgcaaatattctaaaatctgaaaaaatctgaaatacgaaacactttggacaaggaatacccaacttgtattctgaaatatactttatttagtcaatacttgttatttgtctagatgctagaaataaaaaagtaaccaccagatactccttttctttgagaatgtatggtatagtgggagagacaggctgggcactggacattttcaatatcttataataattgctgttgagtgataattcctctctctatataccagagaggtatagagtcacaagaaggggcacttaacccaagtcagggaagacttcctacaggacatgatggctaagagagcactgaaaaggtgagtaggaattagccagttacaagtattaagggttttataagaagagaaacagcttattaaaaagtttagcattaaaaaaaaagtatatgacccgttcatgggtttgcatatagttcacatagttcagtatgaatggagtaagtttggaggttcaagtatgtgtacctgtgaaaggtgaggttgtagaagtaagctaatatgtgcatggattggtataaatccttttttttagatagaagtctttaataaatactcttttatatatcatccaaaaattactgttttaagacaagtgctaaataaatgctcaatttaaatgtaaataacaatttaaaaatagtcacatctttgtaaacaaagggtaaatcattggtttcacttcctatttgtgtaagaaaagactaatggatgacttttgcaatagtccttaatacataaactttgtgagagtagcgattgtgaatttgattcattttgtgaagcttatggttgctttcaaatgtacatagtaataattacctcaacatttgttttaatttagtcaagattatttatcttacctgaaatgacagacatttctgttgagatattattatgattatcattatgatttatcagtataaatcatataaacccaaggccctgactttgacataggatttaaactacattaaataggcagaccttgaaatggtctcaaaatgagttgttgtgggaacttttctatctgagtcaaaccaattcaggaatataaagctaactgaattgagatagaaatagtagatttgtgtgtatgtgaagatgtgatacaattaagaaaagatttaggatttaatttagaaaattttgctagctctttttttatttttattttttgagacagagtctcgctctgtcgcccaggctggagtgcagtggcgcgaactcagctcactgcaagctccgcctcccgggttcacgccattctcctgcctcagcctcccaagtagctgggaccacaggcgcccgccaccacgcccggccaattttttttttgtatttttagtagagactggggtttcaccgtgttagccaggatggtctcgatctcctgacctcgtgttctgcctgcctcagcctcccaaagtgctgggattacagacgtgagccaccgcgcccggccagaaaattttcttagctcttaataagtattagttttgtttattgcaaaatcatgaatatagcatctctgggactgaggaactgtcacaattccaggtcattgtgtggaatgcaggccttgtaaacaatttcgttatacataaagttaactttactatagtgaaagctgttcaccaccaattagatcctgaaactgatttgcttgtgtttatctcaaccaacaggcatttaacaggatacagtatataatatgtccgggttaatatgttttacataacttgcagattgtttacatttattaaattttgcattattcattgttacttttctgttgtatttccaattcacaaaaatacatcagtagtttaaaggagattcattaaaatataaaaatatgaaaattctaacaataatgtacaataatgattataagtataaatagtgaatagttttctggagcaataaaatgtacatttaataagtgctgggtaaagtgaacatggaggtgtgaggatttcgtacaatcagcttaagaagcacaaatagaaagcccactgacaaataccagcagtcctttttcttcctgattcctctggttccaagtatgttgtcttttctcaaactttgtcaaataatcaaaggaagctattgaaactttttgtttttgccattttactgttttctggtacaaaatagatgacttttattactaaaggtgaaaagatcaaaactacaaagacttcattcagaattgtactcctcatagcaaaaacagttacaagtaatgcgcaggattgcttcaaaactggtaaatcagcctcaaagatgatgacaaatatgttcagagagaaagcagaagaaagtattgataaaattcctttatcataccaaattgttggattctgcattatatcaacatattactgtactgtggaaaaacagataccatctaacgtatgtggtagcagataattaaattttaagttggaaggtctaaatcagctcttggcatttgttctgtgaatatgtgaagaaatgcttgatgacttttgtttttcttatcactaaaaacccatactctataatagatatttgtgtttgtttgtttgtttttaataattatttcctgagctgtgatgttgactgcgaaagtgtcattgtgacggtatggagaaccagacttgcccatagcaaggagagggaggtttttacatgaatggaaatgttgttttttaaagttatttcataacctacattttgcaactatgaatgaaaaaatgaaaaactatttcttcataatacttgtaaatcctataaaaactattcctataatttcaagtagtcttattaagtcatacatatcaattcttaagtagccttgacctattaatttaaggtcaacaagatttttagttgaggacaagatagcagaatttctttagaatattaattttggtacatatggctcaacgatcactgagaacatgacttttacccaacatttgatgtgtttactcattttgggggaaaggaattgatgccacattattaagcccatttaaaaataatttccaggtgcaaaacatgaagactttttttttctaacaactttataggactgagtgctgtcaaaagatggattaagaatccttttttctccatcttccgagttaaaaccttcaacgttttaggtttgtgtgtaatataatttttgacttagcatctgttacatattgaaggtagtcttcagtgagaaaccttttcgtaacctctgggttgatgcttattgcaaattatctagaactacctgacagagccatctcgaattcagtattaatcccagtgacctctaagtatgtcatgattttctgattcagtacaaatgaagatgttttaaaattatttttctggataaaaatttcacctgatctatggctcacacaatttatcattgagccagtaagagataccttgatgaaagattgtaaacaatggcattcttccaactaaaactggtggtccacatgcttgttgaaccctcatcaagtgatctagcagttgccaacagtttgagaacaatcttagaatcttaaaatatgaggagaaaaaagaagtagagaaaaagattaggatcagaattagaatttagggaaagaatatgtcagtagtataatgaaagaaataatctattctgaaaatattttctttactttttgaaagggagggctgaataatttatttatattctctttctctcttatttggtttttcctttcctattataaaagtcttccatgttagtgctgttctgaagaactttataacaccatgaatttgactggattgattgcattttagttgtttgccttttttttttctttaaggaggcttaaggtcagtgcagacaataacaataccagtaaacaaacttctaataaattaattgtagaaaggtgtagtttctttgtatttttaaatatatatgactttttatttgtttaattaaaatgaaatcagcatcttacttataaaaatgatgtatgcttattttaggaaattcggccactacgggaaaattatatagacaaaaaaattacctctgttttttaatgtttcatatatatgtaaaaatatgtatttatgtttatatgcagatataaataggaacatatactacatgttttttagtttattggcattagatatagagaaattgaataagaatgttcaatatgactaatttaatgaatgggattcacgagttattataggaaattgtatgttgggtcccacagaggcttttgtggtcctgtgtatggcatgaagatacttcattaaggctaacatctatcacaggaatgctaagtatgatttgctgctgtatttcctatgtctcatgggtatagcacattgctggctgcgattgatgtttaaagagtgttcttccttttccttattcataggcataccatttcctttctgtaacacctacaggttttaccagtgcagatcaacaggagctctaatagcaataccacctacaaatgagtacatactgtgagccagtcattgttctggattcttcttaagcattatttcatttaattctcacaatatccacatagtgtagttattctgcccattttggggatgaggcaaatgaagttcagattgaaagtagcttgtgttctcgataactttgttaaacagtcttaacaaaatgctacctcaggtatgttttaaacttggcactgccaaatatgatttaattggtgtaaggcagggctctggcattggtatgttttaaaaggttcccaagcaattcttctggtagccaccattggaaatcactgatatagataataaccaatttcattttttgcaaaattttaataagtagtcattaaagtttacaaaccaacatcatctggtttagctgtcttttatttcttcactgtcatttattttgcctttcaaattagccaggtaataagactgaaccacattaggctttgccttctcattggaggtctgaagcttggaaaaaagtatgcctgatacctataaataaaatgaatgtatctgtaaatcaaaatcagctctatggatttagttttgttttgttttgtttttctcgctgcaaaataaaagagggtgaacctacgctggttggcttgcagtaagaatactaacatttagtcttacgtgatttgaaacttcctggagagtgtagtaggccattcttgtattgctataaagaaatacctgaagcaagttaatttataaagaaaagaggtttaattggctcatagttctgcaggctgtacaggaagcatggtgctggaatctgcttggtttctggggaggcctaaggaatcttacagtaatggcagaaggcaaaggaggagcaggtacttcacatggcaaaagcaggagcaaggaggtgaggaggtgccacatgcatttaagcaaccagatctcatgtgaacttagagtgagagctcacttattaccaaggagatggtgccaagccattcattaggtatcaacccccatgatccaaacacctcccaccaggccctcctccaacactggagaccacatttcatcatgagatttggaggggacacatattaaaaccataatagacaataaattctgaaaataagggcttatgagtgcaaggaatagtggggaaatattagtgacaaagaaaatgtggagtaaaactttatatctcaaaattctactcctatatgttagatgatctctttttttctggtttcaactacttttatttattttattattttattttattttattttattttattttattttattttattttattttatttctttttgagaccagagtcttgctgagtgttgcccaggctggagtgtagtggtacaatctcggctcagtgcaacctctgcctcctggtttcaagcgagtctcttgcctcagcctcccgagtagctgggattacaggcggctgccaccacacctggctaattttttttttttttttagtttttagtagagatggggtttcaccatgttggccaggctggtttcaaactcctgacctcaagtgatccgcccaccttggcctcccagagtgctgggattacaggtgtgagccaccatgcctggccttcaactactttttaaacaaattattaaagaagttctaaactcttagaatgtattttcagtgttaaaacatgaaataggctcattaattctgatatagaaattttatagttcaatatttaaagcattatcaacatgacattttatgggtagaagcaatattttcagagctaaggctaggaaaaggacatgcatttctagaaagatgcaaccgaaaactggaaaggccagaaattatagagatagaagttaatgaaaatttttactaatgacatcttcagttaactattttctccctttgtattaataaggccccaaatcttagatttaatttaggatctcaacacttatgatcaaagatattagtcccctttcttctttgcatacaaaaaatggggtatgatcataaagcatggaaaagatgtagcttattggtgaagatctcatggacaattttcaaatttggaagaagtaagtaagtttagatttatctttcttggtttaattgtgtcttacctaacaaattagctctcactgtaaaataaaattttagtttttaatccaaaaagggaaacctgaaatgcattttgtatgagtgtgggtatatatgctgaatttgaccagtttgtaaatcagtaagtgggtggtaattcaaagtcaaacgaaaactattcagttggtgaaaagggtggggtaagagaatatttaattgttttggaatgtactcaataaaaatatttctttttttaactctaggaaaatacactggatactttgtttctaaactcactgttgcacaaataaataaagatgttttaaaatgagctctattctttttcaagacctaaatggaagtttcctctgcgtttgagcagacttcagctactaatttgcagatgaactgatgtgttggaaagattttacgtatggaccttaacatgttttaccttttataaaaaagtgaaaataatgttttaaaattggcatttttcttccctgatggcatagagtatattgtgatagggttttaagtagttggaacactaaattgagctttgaaagagaatgctcctatcagctcctcttttttcagttcctctgtacatctcaaattcctgtattgctctgttggtgacttttgctttctttcttgtttcataatgctaaaatggcatggtctcagtctggtttagtttgtcttggtggagagtatcaacaacaacaaaaacgatgacagctcttgagggattggattcttagctggggatggagtggcaagagaggaaggcagaaataaaagttacctcctatctgttagaataaactctttaaaaaaggaaaactttattctcataattcaggcaggctcattatagccgctttccctcaggaaatagacagaggtagaccttccacactactaaataaacaattctactgttgagtattcaaacttttgcgtctaattttaaaggcatgatgacatggggcagagatggcttctccatagggaatttatagttatttggaatcttttacatcttaagttacaaactatttttgtgtttcttactaatcatcttgttaacatattatcaaccaaacattaaaaatatatagagcttctccaatgtaaattccttggtataactaaatattggtcataattttctttgacatgtaaattcttccaaaataattgtcagaaaccatgggcttaatgaatatacaatccaatttacagtatttgctctctgtttatcacagaatggcattagaatcatttggttctatcatttccttgtcttaatcttgtcctagttcccaattgtttttcagttgtgaaacatgacaaagtgaaccaaagactggatttgtaataaaaaaactagagttttggttttggtactattatttattaactgtaccatataaactgggaaaaacatttacatgagcctcagtttcgttccttgtaaaatgtgaattgtaatgtttgtccatgtggtaatggtggtaattgaagaagaggacagatggtgaatataacatgactttatgaagtttaggtgttttacacatatatgtattattatttaaagacgaatggcaacttctgcaagagaaatttaagattccattgaactcaaagttgtatttttaattttatccaaatatttttataatcctcaactgccttttccatcatgcaccaacatgggctttacctcttttaaaaaatgcgtgttccccttacagtagtctattacttcatgccaatcagtctaaatagtgcatattcatttaatgggatttttgaataaaggaattatttaagtcaaaaatacaggctcagaaatagtaactgatattatgaagaattgggcactctatgccgccatctagtgcccattaatttacccttgctggtgccagtaactcgaggattccactccccctgaaatgtttcaaggcaaaaactagtatttatagaaatgagtttctcacacatgatgcacatatattgtctaaaatgcaaatgtaaccatgttacctttctacttgaaaacatttctttgtgcccaagattaaacccaaacaccttagcatggcttatattgaccccaaatatttagtcatgatctactttgtcagtcttattttcactctttccatactttatacctcacatttcagctttaccaaatttcttgcctttttcactaaccacaccatgtactttcatgcctctgagtacataatgcttcttctgcctgaaatatcattccattcccttgctatctagttaaaacctattaatcttttaaagcccagctcaaatatcacctcctcagtgaagtcttccttgattcttctggaaagttaaatgccattccagtgtgctcccagagcacaggcttctagaataagatcttaaactttgaaaatgattatttttgggtgtctacttaccctgacatattataagcataggctttgtcttattctttctttttgtatgccactttgcagtctttggcacataccaggctctgaataaatgtctgttgaatgaatgacagtgattcaatcagtcagtgagtcattcagcattatataaagccataccacttgaaataaaaaaaattatatatgtaactttgttattatttttaattgacaaatgaaattgtatatatttatggtgagcaaaggatgttttaacatatatatactcagtgtgaaataataaatcaagctacttaacatatctatcatctcacatacttatcatttgtgtgtatgtatatgtgtgtgtatggtgataacatttaaaatctatcctcagcaattttcaggtgtgtagtgcattatttgttaccaactatgtgttttcatgctgtaaaatagatggccataatttatatctcctaactgaaattttgtaccctttgaccaacatgtccccattctccccactacgcaagccccaacctttggttaccactattcaaaaaataacttttgaaaagcaatgtccagtgcataaacttcttcttaaattgggaaaatgaacaactttttaatactttgctaataaaaatcagacacttgtaggttgataactgcagattccaggccacactgtaaaaacatccaccactcagcattattaaatattttaattctgagctttgagaagactaatagaatcatattgtaaaactgctttaaacacctccagtctctgcttgaaatatgttcactaatatttcaagcaacacgtcatctgtgagcaattctgatgttaagaggttcttatttactttgagttgaaacctgtatctagtattctcaacccatcattttattaatagtatatgccttgggaacatacagagtaatctcatttgaagttttcaaacatttgaaacgttttctatcccgattgttttcctaatcgcatagtcaacatgtaatacccttgattctttctaccattccaaatatgttatgattctagtctttcacccttcctcttcccccttcttaggatattattgtgcttctgggtcatgtatcacagtattgatcatgccatctgaccattgctgatgagagtgggaatgtcatctccctcattctagatactgttattctgtcaggtcagtttaagatttaattggaatttttcagtacccatatcacatggttgactcatatttgaccttactggagatgctatctcctcttatccaaggatacagtaacaggtcattgagatattatctagttatgatgtcagagaagaaggcaataatctccagtaaagggagagaatgcaaaaaataataataaaaaggtaaaaaattgcataactttgatataatgcaatggctaaaaggtgaaaatattattttaaaatgttaaacctttagacgttaccactttcatattgcagatgtgtgaagcaaatgttgatagtagtatatagtttttagaattaaaatattaaaattttaataattttaacatttcctttgaatataatgacgttaatagtttaccaacaacagatttttaaaaattgatgatttctataatgttggatgcattgtttacatttagggataaacttgtttaggcaaaatttagctgcagttttataataaaaattcaaggaaaatgtattcaggaaacttcactgggatgagtttagtcagttcaacaagtattctatgttattttcattgcttatttttttgagtatttactgcataagagtatgaagtatgtttatcaatgtactaattgtatttacatctatttatttgtgatatttatgctttctagttagattgcaaacctgtatggccaagtcagttttcaccttgttttgtatgtgcttgtatagagttctatgatgttattatacatacatacaaagggacaagctttgtcattgaaaattgttaattgggtttatgagtatcttcaaaatgaagggtgtgtagtacttgccttgttcctaacaaatggattttggattaatcagtgtgtactggttaacccaccttagagctaacgtagattttccctgtaggtctttgaccctgtgacatttatcatcatgaataggcttgagattggaagtttaacccggaaaagctgttatttctttaaaaacctgtgactataactttttaatgtgtgacaatgtaggaggtggcatcacccatgtgaaacttcattgtttgaatagctaagttttctattgtaaggataatggagttaattatttaatcatgttttagacctcatttgtggtatttggaaattaaaatattattctatgtactaaaaccacaaagaataaatgttttctagcatatttatttatttaaaaataaggcaagatttaaaggaatagcaacttacaggtacagttatgtgttttctgatttttgtgctcatcttcacctatcaattactgcttaaaccacattcctccccctagattaattcttccaatgtatttatacttctccttatagactactaacttgttcacagctcctgttgtgctttggaacattttagcttcagattcttgcaagaggatttttattttaaatcaccaactatgtcccagttttgaaagtccaaattacctagttaaaaattctttacttggggcccaccatggtggccacgcctgtaatcccagcactttgggaggtcgaggctggcggatcatttgaggtcaggagtttgagaccagcctggccaacgttttgaaaccctgcctctactaaaaatccaaaaattgagctgggcatggtgtgcaagcctgtaatcccagctgctcaggaggctgaggcaggagaattgcttgaacctgggagacggaggttgcagtgagctgagattgcaccactgcactctagcttgggtgacggagtgagactctgtttccacctcctcactccgccccccccaaaaatttctttactttggattcagatagatgtgggtttaacaccttactgtgcttgttactttggtcagttttcttaatctcatgatctttgtttctgaaataggtggaccttatcagattgttaagcaaaacgattgatagttaatgaagaatgctgaagattatcctcactattagtaaaagcttaataaacagtaatgatcataaatatattattatttaatcagatttctctgttgtccatttgaatcagcaaatcattctcctgaaccttaaagactgtcctgaatgtagctccagtttcattgtaagcttcctctgtgatgaaactaaattatattttagaatgctctctgctaatgctagggggaatgttcttggtttacttcgtggacattcatcgtaagttctgtatgggttcctatggatatatatatttttcagtctcagggccaaattagaaaaaaggttaatgctatctcttcaagcccagtgattaccatgaagagttccctatctatgtatttttggggtggggcaggtcacatttaaaaaatcacaaagtggccgggcgctgcggtgcacacctgtaatcccagcactttgggaggccgaggcaggcagatcatgaggtcaagagatcgagaccatcctggccaacatggtgaaacgccgtctctactaaaaatacaaaagttagctgggcgtgatggcacgcacctgtagtcccagctactcgggaggctgaggcaggagaatcgctcgaacctgggaggcggaggttgcagtgagccgagatcgcaccactgcactccagcctggtgacagagcaagactgtagtcccagctagtcgggaggctgatgcaggagaatcacttgaacccgggaagcggaggttacagtgagccgagatcgcgacactacacttcagcctggcgacagagcgagactccgtctcggaaaaaaaaaagaaagaaaaaaaaatcacaaagcttttctttcatttttttttcaacttttttattgtagtaaaatacacataacataaaatacaccaccttattcaattttaactgtacagtttggtggcattaagtacattcatattattgtgaacccattaccaccaagtatctccagaattattttcatcttgcaaacttaaagcctatacacataaaagaacaactcctcatttttccttcccaccagcaacctggcaaccaccgttgtactttctgtctttatgatttaatttccctaagtacttcatataaattggatcatacaatatttgtctttttgtgtttggctttatttcatttagcatagtgtcctcaaagttcactgatgttgtagcatatgtcacaatttccttactttttaagactgaataatattccattgtgtatatatatcacaatttgtgtatccatttatccatccaatagacacttgaattgcttccatattttagtaattgtgaatatgggtgttgtgaatatggctgctatgaacatattaacaaatatctcttcaagaccctgctgtcagttcttttgaatatatacccagaggtggaattgctctgtcatatggtagttctattttttaactttttgagaaactgccatgctgtttttcacatttctatcaaaggtgtaaaatggttccaacttctccatatcctcactaaaacttgttttgtgtgtgtgtgtgtgtgtgtgtgtgtttgatagtagcaattctaattggtgtgagattccatttcattgtagctttgatttacatttcccaaatgattagtcatgttgaacatcttttcatgtgcttgtttgccatctgtatatctttcttggaaatatgtctattcaagttctttgcacagttttgattcagatttttgttgttgtgtttttaggagttctctgtatattttggatgttaaccccttatccaatatgagacttgcaaacatgttcccttattcagtggtttggctttttactctgttgatggtgacttttgaggtgcatttaatttttaatttttatgaagctcaatttgtcttttttgttgtcattgcctatggcctgttgtcatactcaaataattgccaaatccagtatgatgaagcttttgcctcatgctttcttccaagagttttatagttttagatcttatatttaaagcttatatttagaatctattttgaattaattttatatatggtgttaggtaaggattgaagtttattcttttgcatgtggatacccacttttcccaatcactatttattgaaaagactgtctgttccccattgaataattttagcacccttttcaaggatcatttaaccacactggtgagggtttatttctggactctattttatttcttagtttgtctttacgccagtaccgtgctgttttgattactgtagctttgtagtacgttttgaaaccaggaagtttgagtgctttggttttattcttcatttttagttttgttttggctgtttgggggttctctgatacttcgtgtgaattttgggatgagtttttctatttctgtgaaaacataatttggatttttatagggaatacattatatcttactttgggcagaactgatatcttgacaatgttaagccttccaattcgtgaacacaattcttttcatttatgtcttctttaatttctttcagaaaagttttatagattttattggtaaaaattttatttctttggttaatttctaaatagtattattctttgtgatactactgtatatggaattgttttcttagttttctttttagattgttcagtgttagtgtgtagcaatgtgactgatttttgcgtgatgattttttttatcctgctgctttgttgtatttatttattagttctaacagggtttttttttggtggaaattgtggaatatgttttttacatatgagatcatatgatatgtgaacagagataattttacttatttctttctgatttgggtgcctttcatttctttttttcctaattaactgctctgactaggactttcagtattatgtggaatagtacttgccttgttgctgatctcagaggaagagctttcagtattttacccttgagtattattttagctgtgagtttttaatacatggattttattatgttagggttttttacttttattcttagtttttgaggatttttattataaaaggatgtcagattttgtcaagtagtttttctgcattaatcaagattattgttttttccctttattttgttaatgtggtgtattatgttgatgggtttacatctgttaaaaatccttgcatttcaacgacaaatcctacttggtcatagggtaaaatccttttaatatgctactgaatttggtttgctataatttgttaaggattttcaatccttgtcaatgctcataagagatattggtctgttgtttttatttattgtgtttttgtctggttttggcatcagggtaatacaggcctcatgtaatcaatcagggagtgtttccttctctgatttttttggaaaagtttgagagggattcttttttattgctgaatagtacttcattatgtatatatgccacatcttctttatctattcatctgttgatggacacttccaaatcttagctattgtaaacagtgctgcaacaaatataagagtgcagatacctctttgatatactgatttcctttcttttgggtatatacatacccagcagtgggattgctggatcatgtggtagctcaattttttgttttttgaggaaactttagttgatattattctttttaaaaataattggtagaactcaccagtgaagtcatcaggtccaggacttttctttattgggagatttttgaatattgattcaatctccttacaagttatataggtctattcagattttctattcctttgtggtttagttatggtaggttttgtttttctaggaatttctacatttcaactaggttatccaattcgttggcctagcaattgctcatcgtactcttttataatcatttttatttctgtagaatagtagtagtgtttcctctctcacttctgatttttgtaatttgagtcttctctttttttcttagtatatatatccaaaggtttgtcaatcttattaatatttttgaagaaccaacttttggttttattggttttatcttatttttctattctgtattttacatctgctctaatacgtatttctttccttctgctagctgtgggtttagtttgtttttttttttttttttttagttccttaggttgtaaagttaggttctgatttgaggtcttttttgttgtttaatgtaagcatttataattataaactttccccttagcactccttttgctgtgtttcttaagttttgatttgggataatactttttcattcatctctgggtgttttctaatttctcttgtgatttcttttttgatcctttgtttaagagtatgttgcctaactgttttcattttgttactgatttctaactttatccctttgtggtcagaaaggatactttgtatgatatttgtctatttaaatctatggagacttaatttgtggcctaatatgtggtctatcctggacactggtaattgccttacatacacttgagaagattgcgtattctgtttttgttgggtggagtgttcccagtatgtctgttttattgttattgtttcttgtattactaagtaacaaatgagttttacaattttctgtacctcacaaacccccatttctcttcccagaaaatatctataatattttattcaatttgttcttgtagtgactgtgtaatgtaacttttcctgtttcttctccttccttgtgtctcctgcagccacacacttctctttcctcattactcaggtttaaaaacataggtttcttaaaagatcaataaagtggttacttcattatatataatcatatcactccctaacacaatataatttattgtgtgcttactgtcaaagccattttataaagaaagcgcaatctggaccatattacataaaatacgtgctgttatgttgcctttcatttcatgccaaaaattctagaaaaaaaaatatttttaaaggattaggaccaccagataaatctaagaagtcatggtccttaccactggctaatttagctcatttaaacaatttgaattttcccacttcccttgaaagcccaaaggaagacaattttgtcatgatagtatgacactaacttatcttttgatgagggtattaagagcaagcagtctgatgtactcagggttgaatagcatgccccaatttttgttgactagtgacctctaaaacttattacatttaagcccacttaatatcaagtcacctaatggaagcacatttttttccaccaaatcattttgtactaattcagtacaattttacccatttaatatcaattgacactaaatgatttcctgtgcaatgtcaattgaaaatcactgatttccttctaatacagcacttagtgtcaatttctgtgtgtagcaaaagcattttttcaattaactacaccatataattttttgtttttagttgtttgcatggactgtctgataatagttttatgaaacaaagacataagaaggagaaaaagatgactttcctttttggcattaagtaatttaaatctcatgattttattttcagtctataggaggtcaaatagctccttggaaaactttgaattatatcaagcaatgtggtggtaaattgacattagcagtaaatagaattctgtaatttggcacgttgcatatactaagctatatatagaaaatgttttgactaataaaaaacatcataagttcctcctctcatgatttagttcaagaagatgtactgttgaataatgattaatgaaaattattctttcctttgttagagggatgagctcacttaaatatccttatgcactcttactagaaaagtggtttaacattacctccactaattcatgaaaactgggaaagctgtgtggactagcacagctaggagcagcacagccgaagctgttcttttgattagataatatcgggtttactcagcaaacgcaaatattttcttaataatctatacatctcttcatcattctggatgatgatgggtaatgaggaaattggagtagatcctgattttcttagaaaattatgaagggatgtatgtaaataaaaacagaaaattacttaaagctgtatagaaaatttgtgcatattgaatttttattaaagtactagggtacttagccaaacactttgtaggatatctgcctagataaggcatgacctcttcacataacagagattaacgtctaatgagagaaaagactcataaatgagaaatcatttaaaaacaataaactttaagtgataaattgtgggacacggtttgtatatggtacatatgtttagatttttaggaatatcaatatatacctagaatactctagggtgactcattgagctgtaccctgaaggaagcttctggtttaacgtgaaaatgaggacagaatcatctctcatgacgttaagtcttttttttctttcagacttcttatacagtttgatgcctcttgtgttgtttgtctccctattgatgttagcttcattttggaataatcttaattagaagacattttagcaataattcaaaccaatattttcgaatgtgtactaattgacagatataatactaggaaatgagcatgcagaaagaggtaaaatattaccctttctcttaaggaactttaatcataggggtggagtaatacatgtaaacagataatattaaatagcattaatttgatggtgtacaacaatgtactatgggcaaacaaaggaagggcacatattccagcctgataattcaaagaagacttcttgttgtctaaagggatgtcagaaatgatgcttgaaagatgaataggagatgtatagacagggaaggaaggaggatctcttcagtcaaaggggactatatgtataaaagcatggaaattataaacatggtatatgtgggaaaccattatacccaaatgtaagtgtattttacaaagttcctataataatgtatgtactgttttataacaatttctccgtttaacactatgtgctagttgtttttcccaggtccttaattatttttcataggacattgttttcagctgctatatgatactctgtcatatgttgcaaatagttttttctaaatttattgtttgccttttagtttcatttgtttttgctatactgacctttcatttttatgtgttcaaatattctatttttaaaaaccatattacattttttatggcttctgcctttgcttttatgcttaggaagaccttctccaacccaagataagattaaaaattcttctgtatttgcttctatttcttttatggttttattgtttacatataactcttcaaaccatctggaattttattttgatatacagtgtgagataggctctaaatttactctgttctaaatatttaaccagttgtctcagcaccatcaattgaaaaaaaatctatgtttttcccactgatttaaaatgcattatttatcatatgctaaatacttaatttacaaataggcttgtttcttgtctttctatttgatttccagcctattttttctcttcagttctatcagtttctatatggtttactaggactacactatttattgtggcttttacaatacagtttaaacctgctaataaaagtttctttttagtatttttcattttaaaaggttactggctattcttaaccaattttttataagagatttagaattatttaatcaaggtctctctaccactgccccccccttcaattttattggacttctgagagtggttgcattaaatttatgaactgttttagggagaattgacatagaggtttctcatctggaagatgtcttaatttattcaaaattttttaacattacttagaaaaacattttttccatataagtctgacatttttcttgtagtgttagtttctatgtagtttttattttttatcattggtaataagagattgttctttcctttgcatttttaaatggctgtttttggtgtgtgtgtgtgtgtatgtgtgtgtgtatagtaaacaagcaggttactgatttataagttctaattatttcttaatttttttattctactcctttctcatgtttatagttcatgttaggtggtattgctggagcttccaaattataataataagtgctagcaagagtttgtttttctcttggcttcactgggaataccactaatgttttcaccattaggtgtagtgtcaaccattttataggtagatattcttcattacattaaagagtttcatcatagtttattaagagttttaaaattaagaattgtggttgatttttattgcatgcattttcagcactatcaaaattattgtttttaaaatcatacttatataaatttatcatatatattagtagatattctaatggaaaactttcaactttcttggtcatcacaaattatttttaatatattgttatatttaactcgctgagaagttttgtatccttataagcaaaattatctatattaatactaataggaatacaatgtgagccatatatgcaatttaaaattttcttgtgactacatttttaaaaagtaaaaagaaacagatgaagttaattttaataatgtattttatttaaaacaatatagccaagatattaccattttaatatgtaatatgaaaatgttaatgagatattttagagttttttatagtaagttctataaatctgatgctttacacttgcatccagtcctaattcaatggagtgaagtaacagtgctcagtagcctcctttgctgtactgttttaggcttttgctagcttcagaaaatgaatttggaaatattttgtttttgttactatgttatgggtttattttgatccttgaaaacttaatgaaattcaattttctattaaaactggggtttaaggagatattggtcaaatgatatgacatttcaattaggtggaataagtttaagagatctgttgtacaacatgatgactatagttaataatacatgtattcttgaaaaataatgaatggatgtttactcagaaataactgtgaggtaatacatgtgttaattagctaaatttagttgttctacaaggtatgtatacttaaaaacatgttatacatggaaaatacatagaattttatctatcaatttttgaaaaaggaaattaaatagaatttgctcttgaaccacctgtttctggaacctttcttaattaatttttaaatttattggcctgttaaaattttccatttatagagtcaattttgaaaatgtatattttcttagaagattatgtcctgagattttcaattttattagtatatatctgtaacagtattttgacatattttaatgctttctgaatatttgtagtacatttcttattctttattttgtatatttatgcattgtcttccatatgacttgattaacaaaattgggtaattatttacagaatattttgtgaagtaagaatactttacttttattaatgcagaatccaaaggactgcatgacacaccataggatatagtcaagaagcctttggacatgggagtttcaagctcaaaggagaattcatacctgaagagaaatttggaagccatcaatacattggtagttgataagctcatgaaaagagattgccaaaggaaaatgtgttgaataggaagagacagaatatccatcagagtgcctgattcagtagcattgatttcttttctttacttgccttgtcaataacacaatatttttagtataaatttaaatggaaaaatttcccttaatgaaagaacaaagactttaagcttgtgtcagaaaggtaaaagctattcacattgtttattttactttagtcaataatttccaatcttgaagattattttgtagaaatattcagagacgtatgcaaagatttatctgcaagcatgtttatcagaaccatttatagtagcaaaaatttttgacagtacctaaatgtctaaatgtaggaatgaataaatgaattatatttcattcttactataggatattatgcagtcattaaaatactattttaacactttttttagaaaaggtaatgctatataaaatttaatattaagcaaaaatactgagattcaaaacttctgatgacaagtttattttatataactatattacacctgggaagaaatgcctgtggttgacaacaggtgattttttttttatattgttactgttgctttttattctattttcctcccgcaatgtttttcatataaaattactttgaattgttttttgtttatttaatcaatatacacaggtgatgaaaggagggagaattgttggtaaaaagaggcacagagtcaaggtaatgttagaatacaaatgatttacatgttttgaaaaataaagagccagcagagaagacattgaagtcaagcagagaaaaatgataattgtatagaaaagtcccagagacttcaaggattaccacatttagtacttaggtaaaggggttggtctcaagtagaaggctaatgatagtgggttggtagatacgtaagtgaaactatgacatgctttgagtccgtctgattgtcacaataactctataatgtaggtcttactgttttacagaccaataaattgagttttaaagatgttaggtgaagaacaattaaattctagaaaactttggtgagatggggtccagcatttgtacagttgaagcaaataaggtatttatatgttatagatgaaatgatttcaaactgccaggagttatttggtacagattgtcagtaagcacagtacagtgaacatgcatgaatttgcagaaagtagatgaggggaaattgccagaaataatcctagtcaaaatggaccttacctaacttacttcagttttctctatttcttgttttgacccccaaattgaacatcggttatttgtaagcctgtaaaaatactcatttctgggtcttcagtgtctctcattaaatgttgttagatgtgtagacatatacctgacttcacatttgcatcattgtgtttttctattaatccaagctttaatccatccaatcagccacctaaattatgctaaggcagttactttgtgttaggcattattttagtactgtattttagtatatttagtatttttaaatattttatatatttagtattttagtatattttatatatttctcttatatttagaaatataagagaaactcctttatttatgcagactgcctaattgtgatattgtagcaactaaaatttcatgtagtaggaaaattgagaaatatttatgcaaatgattcacatatgtgttaagcctggaagcaagaaagtggagtttttcttatttaaacccttcattttacaggggaggaatcccaggtccacagatactaatttttttcctaaagacattatattaaataaggctttcctcaatttgtataatttttattttgtgatcccatgaatcattttttcttgatatatgtaaatatttcttattatattttattacttttattgtgggaatcatacttttccaactagaaaaccattccttgctatttcatgtgaatcttcataataatatcaaagaatatacctaaaggaatataaatcattctattataaagacacatgcatgtgtatgttcattgcagcactattcacaatagcaaagtcatggattcaacctaaatgcccatcaatgatagactggttaaagaaaatgtagtacatatacaccatggaatactaggcagccataaaaagaatgcgatcgtgttcttctcagggacatggatggatagggctgtaagccgttagccttagcgaactaacaaaggaacaaaaaaccaaataccatatgttctcatttataagtgggagctaaatgatgagaacacatgaacacatagaggggaacaacacacactgggcccatcagaggatggaaggtgggaggagggaaaggatcaggaaaaataactaatggatacttggcttaatacctggttgatgaaataatctgtacaacagacccccatgacacaaatttacctatgtaacaaacatgtacttgtacccctgaacttaaaataaaagttaaagaaagaataaggcaaattttataattttaaatcgatatataatttctattttagtaacagtagttactagcggtaactactactactaacaacaattaaattcaattgtattttcttagtgaatatgtagctgctatgttgtttaaataataatagtgttagggcatctaaaaggaagttttatgttgtacagtcaacccctctctgttgtgattgaagtgtatgaggaaagttttacttttctaatggcctactgtacagttcttgaaattcccatcactagcaaccagttcttttcaaatggactgacttgttaaaatgcaagagggatgtgaggtatatgctttactcttttaatatccagtgtgagttaatttgtgggattgttttcccaaagcacctatccaaaaggggtgccttaagggaaaatgggattcaataacaggtaagttttaatgaggaggataaaaaggtgggttgcaagtatggggaaaatccaaggaataacgtagaggtctctgagtaccagatgtataatgaggatagtagcctgttcttcgtcccattatgggccttatcaatttatattgcagttatgtttctccctctccacctaggttgtaagctcttccgtgtcaaagaaggcctaatacatctatcaatagcacttaccgtagttcctggaaaatagttaggattcagtaaatatttattggctaaataaaggaaaaacttgaatctaggagttcaagattattacaaggaagaaaaagggagggtctaaagaaaacagtcagtcctatttttggccttgaccaactttgctttctgccaacagtagtcctctcatttagtcttgcaagaagaggtaagctacaaaaactttccatatgctatacactagaccatgtagtatagttatgaaatgagatatagatatcaaatataaatgatcagtctcaaaaattatacagtaaaatacatttaactttgaagtactagtcatttaatacttgactcaaaaagagataaagagatataagttggaatcattgaaatcttaaatgaacttttatgattgaactagttatgcttggaagtactggttaataatattctgattgtaaagaacattttctttattttagcatcattttttcctctgagtacaccagtagtgtagtgtaagaatcaaaaaggagagaaagaaaagggagaaaagtgggggaggagaatataaaatttggacagattacaaggaattaagtgaagggaaggaacaatttaaaaaaggaaaaaagtacaaagagtaaggatttgttgaaaactccatagtgtaagagtttattcaagtttggatttgtcaaagagaagtatagcatatttcaattccttatggcaatcaagacggaaagatgactacgagaggggatagcagagacagggaaaggtgagaaacagatgtagaagaaaagaaggtgatgcagaactgaaaaagacacagacatgagagctgagaaagaacacatggggcacaggcatagaaagatggaatgaaaaacaaaacaaaaaaagagagtttatgggattcaacagaattgaatctaggcatattgtgtagtgccagcaaagttgaaacaagcacagttttactgtgtaagctatgaatagaaagtaaactgtccattttttaaaaaaagatagaaaccctattctacattgaacaacttacttcctcttcctagttctttcttccatttctacctgttaaggtttcaatctctgtccttctaggcacaatttaactgtcatgcttcagttaaaatgaattcttccctctctatttatatagtgcattctaactccaagagaacacttaaatctgtctcacagtagagtcattgaaggttatctccttacctcactatttgttcatgagtcagggctggtctcattgtttcttcatcttcatattttgtctcagcatctcgcacagtgttttgcataatataggtgctcaataaatactgcactgaatggaaaatacatatcagatatccaaaagttaaacatccaaatatccttgtcatagtgaaggtaatatatttattccaatgattctatcactatcaaagttacttacctcttttgaaactgcctttagaaactgcacaaaaccacccaagataaatggcttttatcatttccataatattttttaaatgattgcccatttggtgactgaaaacagatagttacagccttagaaagattagtttgaagggagtagaggaggcaaaggacaacaaattggagtagattgtagagttggaggtgaagaaatgaagataagggatttctataactatacaggccaggttttgctatggcaataaacttggctctgtcaggtaaacatggctctaagttactcttgactatttctaaaaagcaacgaaaattaaagagcagttgtcagtgaaaatattcaaaatgatatgttgttggcactgaaggtcaacattgttcgcacattgtgcaatatttagagcaatagctatactgtttaaagaactgtctcccaaggcaactactttgcaaagaataatactcattttggttgcataaattttcattatgtaatagacagttccttttgtttaaaagtatgttttagaatatcaacttgagtctttttatatatgttattaaataactaaattttgtaaataaattatacttttaaaatttttataaataatactttttccatgtggtaaaccatcattccttaatttatcttttttacgtatcctaaattttcaaaatttaggaatttaaaaatggagattgtctgaactattatgtgaatagattcaaatcttttgaacaaatgtctcaactttttcttcaaaactgttaataaagtgtcttaaaggccaaaatgttgctagtattcagaataatttttcaaaatgaagtgattcctaaaattattatgctatggagtaaattaaatatttatcctacctggaatagccactttcaaaatgtctccattcaaatttttttaaattttatttatttttaactaagaagagcattctcagtggaaatgtataaaatattttaacataatatttagtttgacaaatatacaaacatttccattgttacactacacatattttaagtaatgatgacttattttgagtgtgggagagagtagattgtttgaattataaaagtagaatttcttggtagcagaagaaaaaggatcctttttacagaactcagtttatatagcataacacatgcaaatatgttcatttgagaaaatattcatgtttgaacagtgactcaagtttgcattcattatataaaaatttttaaataaaacctttacaatgtaggacatcattgaaaagaacagcttcattacacataaatatttaacagtatttctaatgttgcgtatgtgtagtttttttacaaactttcttaactttacgtgtatatgtgtacacacagatactatatatatgtatctatggaaatatacatactaccccagtctttacagtaagcttgttatagaaagacaatgcgttttcagtaagtaagcttgcttttgtttttgctgctgaacttcatatgtttaggcctgatttcagtgaaaaatcaagctgactaaatccaaaattcaaacataaagttctttgtattcatgcaagctattattcaggaaaagaacaattaagactttaacttagaaaacactctaaattaaaaatggcattccaaaaatatgaggaaagactcaagtaatacataaaattagactagatgaaacttgtccattaatgtaaattaaaagttaaagaagtaactaaaggataaaaaacctacagtccatggctgtatcctgccttttactccatctaacagcctgtaaaaatttaaattaactcacagatctaaccagtaggacattcgatcgtacaaagttataccatagcaataatgttctgcctcatagtggtattaaaagaaatttctgtttaatagaagggaagtctttcatttataataaagctattcaatgtagagtcaatccaacaaaaatgtttcaataaatgtttaaaagacttacaatgtaagcataaatggaagagaataggtattatatgtgtgtgtgtatagagtatatgtacaatatgtttatttaaagtagagatgaataaacatgaagaagcaaactagatttacatatgaggcaggggagagactataatgagtacagtacaataaagtctctagattttatcttttatcatcctcaaaaaagacaattaaatgttttaaaaaggaaaagaaagaaaatgtttcttccttgaactgctttaagattcctttacttgaagttaaaaactgtagctgccataactagttgggccattagtttatctaaacctgtctagacctgactgtagtgtttcccattatatgcctctgaattaattatcatttgcaaagatctgaaacctttgtcactgaagctactttcatgggatttaacaaaacattttgaactgttgtgaaaatactgaggctaaactgttggttggctgctattggtattacgtttggtaatttataggtgtagcataaccatgctcacacatatatcaattttaaaatataatttgtctttttgaataagcaataaaacactaaagcctgtattacataagagcctgggtacttctggtggctcaagacatttgggtttcagctttttgcttgaaaatacatttgaggaagtgcaactaatcctacgcagagttgtgctgcccaggaatgtcttgttcttccactcttagaggaaagagcaaatacttcatttccaatcatgctgtctgcttcttgcatacacagttcaaaaatccttttctgttagctggactgttctgcatttatctcctgaatttttgttgttcttatttttgtggaagcattttatttcttctctaattatttctaacttttctctgcatttgtcttccctagtttgctcagtttttccttttactacctcttcggagttctctgtccaaccaagattttctttgcagttttatgtaaccacattggctcttattttggttttggatgtctgtaacttaggaagagacttctctttattgtcattaatgttcctcagacatcttccacctgcattcagtatatatccagactttatttcacattctttcaaattctctttccaccctcagtccattaattttgtaatataacttttatatgaaacaaatgttcctaggtacagcaaagactaaaagaacgaataaagtacttagatgtccgctaatttttcatgagtctaatgttaacattgagaccatttcagtatgtattaagtctgcaacttccttttttattgtatatacataatatttgctgcttgaagcactaaaacataggacatgcactaaattcttcagggagccctgcatcacatacttttgttcactaaatcccaggtaattataaacctcattttgtttaaaataccatgatttcacttggtataattcattcaatgcagttttctttttacctcaaaacaacccctgaatatgatcataaattatttgtcaacaaattatttaggttcaaaattaatccatctaaaattttttctctgtcaagatgaagggcagatttaaactgctatataaacagagaggggtaacaacaacattgggaaaaattagattttttcttttcttgtggcagcacttaaaatatttagtcagggtaggtaaagtataactgagcaaattgctgaatttcaaaccataaattgatgtcgggtacaaaggacaaaaaaatcacacaatctggaggggagaaaagttaacactgtattaaaattgtcaagcaacttctaaagtagatgaactgccttcataatattctcagaacaaaatgttctccaagagcagatctgatatgaagagccaaaaaaatgaaaaacattcactaccaatttactgcagtcacccataaactattacaagaacattatgtattagggttcaagccagcaagctattaaagcagactgccctggtgtcttttcattttactttaatgctaccgaagcattaataactcttcaaggaattgtagttatgttgaaattatcttatctcataatcaatttttcaaatattccaagtcttttaaggtgagctctgtttctttgtttcttgttggtcagtgttgttccactttcacaaatgcgatcatcattttttttgtctagtccaattcttactttcatcttgggaacatatcaatctaaatggtgctaattgccatagttaatgaatgccaagccatctagcacccttggccccattgccactttatgtgtctctgctcatgtggagatcaaagaacaaaagatggaaataatcatatttaaaaaattaagtagatgtcacatatacaccttttttggtttgttgttttttcaactttgggagaataaataatcctgctgaaattacttttcgttatagtctgtggttaattttatcttgttaaaaaattttctaactaaaccttttttttttatttaaaggatagcaatgatactatggcaaagcatgattaacccaatgatctaactctttaaacacactaatcactgtttttccttggtggcataaattccaggcaactgaggcatctttcagtcttctttactaatggaaaatattagcacatataaacttggtacaaaattagaagtcctggtaacttcatgcatacaaatcagcagtgattcaatgtgcaactttaagagattaaaaaaacaacaacaaaaatccttaggcataaacaggattaaatttggaagaagtcattgaaaagtaaatttcaagaaactgggtgtttcttgccagcacagaaataaccacaatttagtaacattatctgaaagtaaatattcatatatttgtgtgattatttagtatgtgcatatgtgttgtatatatgtatgtgtatttgtatttctacctcaattagactgtaagatccatgaggcatccttcatttcattaccattatatctccaattccagcacaatgtctgaaacacagcatttactcaacacatatttgataaagaaactatagtgatgatacaaatgaaattgtatataatttaactttttaaaatccttaatatgaaagaaattgtgagaaagcattaatgataacatacttcctcaataggtagttcaattcacatctctctgtgacagcattttttttgatctatctaaataaaaattgccatctttaaactattaatttatactataaatttttcttaaaaagatttaccaatgatagtttaatggaaatagcattgaatctataaattactttgggcactatggtcatttttgtgatatgaattctttctatccatgaacatggaatgtttttccttttgtttgtgtcctttctagttttccatgaggagtggtttgtagctgtccttgaagaggtccttcacttcccttgtcagctgtattcctaggtatctcattgtttttgtagcagttgtgaatgggagttcattcatgatttggctttctgcttgcctgttgttggtgtataggaacgctagcgacttttgcacattgattatgtatcctgagactgctgaagttgcttatcagcttaagaaggttttgggctgagatgatgtgcttttctagacataggatcctgttatctgcaaacaaagataatttaacttcctctctccctatttgaatatgtttatttctttctcttgcttgattgccctggccagaacttccaatactatgttgagtaggagtggtgagagagggcatccttgtcttgtgctggttttaaaggggaatgctcccagcttttgtccattctgtatgatattggctgtgggtttgtcatatatggctcttactattttgaggtatgttctttcaatacctagtttattgagagtttttaacgtgaagggatgttgaattttaaaattcatatggaacccaaaaagcacccaaaaagcaaagacaatcctaagcaaaaataacaaagctgcaggcatcatactactggacttcaaactacactacaaggctacagtaaccaaaacagcatggcactggtacaaaaacagacacatagacccatggaacagaatagagaactcagaaatgagaccacatgcctacaaccatctgatcttcgacaaacctgacaaaaacaagcaatggggaaaggattccctctaataaatggtactgggagaactggctagccatatgcagaaaattgaaactgaaccccttctttacaccttatacaaaaattaacccaagatggattaaggacttaaatgtaaaaccccaaactataaaaaccctagaagaaaatctgacaataccagtcaggatgtagccatggggaaggatttcatgacaaaaacgctaaaagcaattgcaacaaaagcaaaatgacaaatgggatctaattaaactaaagagcttctgctcagcaaaagaaactatcatcagagtgaacagacaacctacagaatgagagaaaatttttgcattctacccatctgacaaaggtctaatatccagagtctacaaggaacttaaacaaatttacaagaaaaaacaaacaatcccattaaaaagtgggcagagcacatgaacagacacttctcaaggaagacatttatgcagccaacaaacgtgaaaaaagctcaacatcaatgatcattagagaaatgcaaatcagaaccacagtgagataccatctcatgccagtcagaatggcaattattaaacagtccagaaacaacagatgctggtgaggttgcggagaaaaaggaatgcttttgcactgttggggggagtgtaaattagttcaaccattgtggaagacagtgtggagattcttcagagatctagaggcagaaataccatttgacccagcaatcccattactgggtatatacccaaaggaatataaatcattttattataaagatacatgcacgtttatgccaattgcagcagtattcacaataacagagacatggaatcaacccaaaagcccatcagtgataaactggataaagaaaatgtagtaaatatatatcatggaatactatgcagccataaaaagaaatgagatcatgtccttttcagggacatggatggagctggaagccattatcctcagcaaactgatagaggaacagagaaccaaacaacacatattctcacttataagtgggagctgaacaatgagaacacatggacacatggggagggggacaacacatactggggcctctcaggggtttgggttgggggaagtgagagcatcaggaagaatagttaatggatgctgggtttaatacctaggtgatgggttgatctgtgcagcaaaccaccatggcacacatttacccacgtaacaaacttgcacatcctgcacatgtaccctggaacttttgaaagttgaaaaaaatatttatcagtccaaaataactttatttatgtatcttataggaatgaaacaatatgtttctttatttgtgcacaaaacatattttatattgcttaattagctgatctagaatatgtttttttgtataactattatgtaattagtcacattccaatcaaacttacattaaaatgataagcaatgatttctacttgcatagcatatagggcatctgagacccaccacacagcaagtaagaccacaactattgctaaacttctcctcactccttccatgatttatttcctcataacagaactacaaatgtgatgtcattaaaacagtcaataaggttttcagcgaaatagcttttcttagccttttataaagtgacagccactttataagtttatgggtgaggcaatgcagtgaagagcttgttttgttgtcttttgtattgtcttgtctttctccttgacatgttgcttaagctagtgttttaatgagaaaagtactcaaatgaaaaacaaacaataaggaaacaaaaaacaaaaaagacaccgataatcatagatgctttgataaacagacactttgaaatttagagcaacccttctacgttaactagtataccctaagatccataagagcactttttggttcatcgctacatctcctagcagactaagagcctaggagattgtataattcacagaaaaaaactcaataaaaatatttatttattatttttatttttaatttttgtggatacttagtaggtatatatatttatggggtacatgaggtattttgatagaggcatgcaatgagtaataatcacataagagtaaatggagtatcgagtatccaccacttcaagcatttatcctttgtagtacaaacaatccaattgtacacttttagtttttttaaaatgtacaattaaattatttttgactatagccattccattgtgctagcaaatactaggtattatttaatctttctaactatttttaacccattaaccatccccacttctccccctaccccaaacaactatctttcccaacctctgatagccatccttctctttatctctatggttcaattattttaattttagcttccacaaataagttcaaacatatcaagtttgtctttctgtgcctagcttatttcacttaacctaataatttccagtttatcaatgttgttttaaatgacaggatctcattctgtttatggctgaatagtactgcattctgtttaaatactgcattttctttatccatctgttgatggatacttaggttgctattataaatatcactgcaataaacataggagtgcagatatatcttcaatatactcatttcctttctttttagtgtacacacacacacacacacacacacatatagggattgctggatcttatggtagatgtttttagttttttgaggaacttccaaactgttctccatagtggttgtactaatatacatttccaccaatagtgtacaagggttcccttttctccatgtccttgccagcatttgttactgtcttttggatcaaagccatttgatccgaaatgtgtctttgttgtgcctttttctgatttgaacattagggtaatactgtcaaatatagaatgagttagaatgtatttcctcctcctctgtttttcagagtatttgagtaggattgggtgttctttaaaggtttggtaaaattcagcagggaagccatcaggtagtgggcttttatttgctaagagacttcctattatggttttgatctcattacttgttattggtctgctcaggttttggatatgttcctggttcaattttagtagcttgcatgtgtctagcaatttatccatttcttccaaatttttctatttctttctatatagctatttatagcagccactaacgatcctttaaattctgcggtatcagttgtgatgtctccttttacatctctgattttacttatttgggtctaaaagtttgtcaattttgtttacctttttttaaaaaacaactttttgtttagcgatcttttgtattattttcttcattttctactcatttatctctaatctttattatttattttcttccactaattttgtgtttgatttgctcttgcttttgaagttctttaatatgcatcactgggttgtttatttgaagtttttctattttttcatgtaagtacttaaagctataaacttccctcttagtactgcttttgctgtatcccatagattttggcatgttgtgtttttactatcatttgttccaataaatctttaagtttccttcttaatttactcatttaccacttgtcattctggaacatattgtttaatttccatgtgtttgtatagtttccagaattcctcttggtattcatttctggctttattccattgtggtcagaaaaggtgcttgataatatttcaattttttgaatgtcttaagacttgttttgtgacccgacgtatggtctatccttgagtatgaactatgtgctgaggaaaagaatgtttattctgcagctgttggatgaaatgttctgtaaatatctattagatccatttggtctatagcacagattaaatctgaagtttctttatggattttctgtctggaagatctgtccaatgctgaaagtggggtgttaaagtctccaactattatagtattggggtctatctctatctttagctataaaaatgtttgctttgtaaatctggatactctagtgttgggtacctatattacaattgttatatccttgtgctcaatcaacccctttatcattatgtggtgaccttctttgtctcttcttatagttttcatccttggaatctattttgcctggtctaagtgtagcaactcctgctcttttttagtttccattggcatggaatatcttttcccatccttttattttcagtctgtatgtgtctttataggtattgtgtgttcttataggcaacagatcattggatcttttttgtttgtttgttcattcatccactttgtgtcttttgattggagagtttagttcatttacattcaatgtattcttgataagtaagaacttactcccgccattttgttttttgtttcctggttgttttgtggtcttctcttccttctttcctttcttcctcttttcttttcgtgaagatgattttctctggtgatatgattaatttcttgctttttactttttgtgtatccattgtatttttttaaagtttaagttaccacaaagcttgcatctactatcttataagcaattattttaaggtgacaacaacttaacactgtttgcatgaacaaacaaacaggcaaatagaaaactaagaaaaactctacacattaaccttgtccactagcttttaaactttttattatttgtacttgtatcttactgtactatgtctcaaaaagttgtatttattttttttatcggttcatcatttactctttgtacttaagagatagcagtttatacactgcagttacagtattaaaatgttctgtgttgttctgtgtatttactattaccagtgagttttgtactgttagatgatttttttattgctcattaacatccttttttatttgattgaagtactccctttagcatttcttgtagaacaggtctggtgttgatgaaatccctcagcttttgtttgtctgggaaagtcttcatttctccttcatgtttgaaggatattttcaccagatatgctattctagggtaaaagattttttccttcagtactttaaatattacctgccactctctgctggcctataaagtttccagtgaaaagtctgctgccagatgtgttggagatccattgtatgttatttgttacatttcttttggtgcttttaggatccttttttatccttgatctttgggagtttgattattaaatgccctgaggtagtcttctttgggttaaatctgcttggcattctataaccttctcgtacttggaatattgatatatttctctagggttgggaagttctctgttattattccttcggataaactttctacccctgtctctttctcttcctcctctttaaggccaataatcaggtttcctgtttgaagctattttttagatcctgtaggtgtgcttcattgttttttattcttttttcttttgtctcatctgattgtatattttcaaatagcctgtcttcaagctcactgattctttcttccgcttgatccattctgctgttaaaggactctgagacattctttagtaggccaattgtatgttaaagctccagaatttctgcctgcctctttttaattactttattctctttgttaaatttatctgataaaattctgaattccttctctgtgttatcttgaaattaattgagtttcctcaacacaggtattttgaattctctgtctgaaaggtcacacatatctctgcttctccagcattggtccctggtgccttatttagttcatacggggatgtcatgtcatttccctggatggtgttgatgcttatagatgtttgtccaggcattgaagagttatgtgtttattgtagtcttcaccttctgggtttatttgtagccgcccttcttggaaagatgttccagatatttgaaaagacctgaatgttgtgatctaagaaatatctactttaggggcatcccaagcctaataacactgtggttcttgctgatttatagaggtataagctttatggtcttggctaagatctgggagaattctcttgattaccaggcagagactcttgttctctttccttgttttctcccaagaatacagagtccttctttctctgctctaagctatgcaaagctcagagtgacccaagctcctttgcagggtggagtaacccaagctcccttgtggccatcaccactatgactgtgttgggtcagacctgaagccagcacagcagtgggtttcacctaaggcctgatgtaactgctccctggctactgcctatatttgctcaatgcctgagattctacaatcagtaagtggaaaagccagccaggcctgtgtacttctcttcaggacagcaaggacccccaggttccacatgggtccagaagtaccatctgtagcagtatttttacaaagtagtagaaaaccttccatactcccttaccagagaaaggtaaaggtcaatgctcattgttttgttttttgcttagtgggacaaaagtaggaaaggaaagacaaaactttgataattaaccaaagctaattaccttttcgaataagtcggcacttagtaaaatgtaaaacaaaagaaaaaatacataatactgtcttagtttattttgtgttgccataacagaataccacagactgggtaatgtataaagaaaaatttattgctcactgttctcgaggctgtgaagccctataaaagggtgttgggcatctagtgagggccttttttctgtatcccaacgtggtagaaggcatcacatggtgaaagagctcatcaaatggggagcaagaaagagccaaacttgcttttataacaaagctactgctgtgataacattaatccattcaagagtgtggagccctcatgacctaatcatctctcaaaagtcccacctttcaacactgttgcattggagattgagtttccaacacatgaactttgagggatacattcaaatcacagtaaatacctagtcgtctcaggaagaggaagctggtgtagaggcacatgaacatgcacatatgtaacctctacttgccagctctggactaataatgtgatagaacgtaattattttactggatttattctcactgcctgaaaggggatgagaaagcattgttgggagaataggtatgtaggagaaactaagcacctgggcttattggctttgttaaagcaaaattttagtcctggaataaaagcttacaggataagtcaatctgaattcagatggggtggggagagtggcaaagagtttttactcacacaatttttaaccatatagattaagggctatatagtgattgtacattcaaatgagatgacataactgtaaaaataatacagaacaaaaatatatagcattaaaaaaatttgaagaatacattccagaagaaaacattatccaagaaacagaagaaaattcaagaacaagaaatataaataacccagtagataatgttcaaaggatctaaaaacataattcataaaaatatgtgtccaataacgtataaaaatattcaatcttacatacacacatactaagtttccttatcagattgacaaggttttacaaattagataatattcatggtttgtgagcatataggaaatatacaggattggtgggagcataaatagtgtaaattacttagaaagcagctgagaaagaactctcactttttaaaatgtaggtacattctactagcagaaatttgtattacagatatactttgtttaaatcttgctttctatgcttgtaatgacctgatttatctcctaccaagaaaaaatgtttgccattacatagatcagggacagggaggagtaagttacttctaataccaaggaaatacaaaacttacagaagtggatctagattttagtccacactttttcattaagttacttttatattagacatttatctttcctctctaggactgttttttcatatgtaaaattatgtttagaatttttagattattgaatgatccttctatctctcaaacattgttcacgattacttacaaaaagatgttctttatgttttagctgcttattatcaggagcatttttatggttatttttctaataccagttgaatattgatgatacatctcatctaatagaaacatattttctcctagccctgcctttaaccctcagcatacagattacagggcaactgtagggaaacaaaggaaagggcttgaactcaaggttcttccaaatccccttggtggatgacagtgccattaaaagagacgggaataacagaaaaatatcattttggagtgaagatttaaaaactgcagtttgatatgtcataagttgaagtatctatggggcattcagctaaagatattccatagtcagcagtatgtatacaactggagagatatagaagagctgtgataagggcaggagctacagacttgagagtcatcaaaataaaggtgatgtttgaagttgaagatgtgaatataatcactcaaggaaaaggatgatgtgagagcaagagactgttggaaagcagaagaagaacccatatatagggtcaagaagaagcagaagagcctgcaaaggaagagaaaagggcaggagaagagccaaaaagtatgaagccagtgagaggacagtgtttttgaaagaaaggagttgtcaagaatgtcaaaacatctgagatataaagtaaggtcaagtcaaaatatattcaattggatttgaccgtcttgtgatttgcgatcttggtgggaataattaaattatgttataagggcagaagtcagttttcagtggactgtaaacaggatgaggggtaaagaagtaaaaactctcttcaaagatttgactagaaataatagagaagaaagtggtaacagagcaaatcttcaaaaaaggattttctttcttttctattgtatgcttatttttatgtatatttgatgggagataatcatgcatgtttatatgctaagaagaaagaacttataaagaataaaaagttgagcatataagtgagaaaaagggataagtaatagaacacagagcgattgttaaataagtattcattgaacagcttattatgagtaaagtcctgaagaatgagtttgatgacatttaaaaaacacataaaacacattgtttaaaatattctctaatttctgttttttctctttctcttttttttatttcagaaaatggtatttcctccttattcaaaaggagtagacataattggcaaattaagtgataaaatatatagaggacaagtatttccagaagaagttgaagtcataaaggatatttcacttgattttatcaaaacatatttttttagacgactcaagaaaaagtaaaggaatctcagaattttacttaaaacatactgactataatgtaattacagtgtcttaatgaaagaacagactttgcacaatgagaagtagaaagaaatatagatagaactattttgcagaaaaataacaaatactcctattctcatcattaagtttactaacaatctgaaagactaaactcaaaagggattttctggtattgctacattaaatcagaaaagaagttacctcgagttttttttaataaaaagaaacagctaaatcaggttaaactaaaaagatttcaaatgaatatctaagggaacaaatagtgaaaagtcagtagacagcagaaacttggaatgtattagtaccaaaacgctaaacaaatattaggctattaaaacactaagaattagatgtgttgccttaaaaggtacttagttcctccagcctggtatgtctcagtggccacttgatgctgtagaagaggctcaggtgccaggtgcatgataggggtaggtgggctctaaggtgcccttcagctccattttgctacggttatatgattctttgagatactttgctaaaacataaaggcacaatatatttttgccaaggaggaagataatgttctgaccaagaaataatattcaggggaaaaaaaagaagtgccatgatttcacatatttcaagctttactaaggacaaatggttatatatatatatatatatatccaactggataaattttatgactatatttaattaatatgagcacattttagagtggagaaaacaaagacttcattcatccagcaaatatttattcagtacccgaagtgctagaaactatatgagggtagtaaataaaatagaatattcctgtcctactatggagggggaatggagagggagtggaggaatagatgataaacaaacaaacaaacaagcaaactagttcattgtacataaagaagttatttttttctgacagtaactaacaaaggtctgggcaagaatcagagggtgaccattttaagaggtggtgtttctgttgagactcaaatgataagaaggatccagtgatgcagaaatccagggcaaggaataggatgtttgaagcctccatagaagaaaagcattttatagtagatcagaaagcaataacaaaaaagaaaaaagaaaaaaaaacatttggcaatgtctaggaacaaaaaggacattaacgtgggtagaatgctgtgagctaaaaagagagtagattgaaatgaagttaaagagaaatggagagacagacctcatagaattttgccctaaatgaaatgggaagccagggaagtatgacacagtcccataataaacctgcttctggtgcagaatggattggaattatcaaggcagttagtgaggaatccagttagaaggtgaatacagtggttcagtggtccaggatggaaatcacagtgacctcaactaagaaggcagcagtagaggtagagagaagttgatagatttgtcagttaagtcctgaatcaccttgattgttacctactctctctctttggttcttaattttgtcttctgtaaactgggattaattatattaatgcaaagagatgttcagaacatgatttgagacaagacatgagtacctgacataaggtaggatgcagtaaatctcagttctttacaaataacttattttaaaataatgtccattccaagttcaaaatagtaatagcaactaaacatctagtcagatataaactgtttggttttcaaacatgtgtataatttcctagataaaggaaaacatttaaatgttttcatgatatatttggggtcattaaaaatttatacagataaatttatacaaataaatacaaatacacatacaataaatacaaatacagataaaatgtatacagataaacccaatgaccaattaattacaacaaaaaaataaaatcaagaggtggaaatttttatttaattgaggttcagccacattctattaaaccttttctaaatgtattaatttaaaagtgaagaattgaaaacaaattttcagggtaagaatccctctcctttgaaatggggttgttggcttgaatacaatgactacccactttccctctgtctctgcttctccttcataaacaggcccacacacacacatacacacactcatacacacacataacttttagtaactctgtttaacatttggaaagaaatggctggcatgttgaagggggataagtaaataagttgcatgaactgtatataaatgaacttacttaaaattctttaaacagaaatttcagtaccatagagatccttgaaatgaagacagataaatctgaccaattatagccaaatatctcttgctaaaaatttagagaaactttctatgaaatgatttgtaaataaaaatcttaatccaaaattatattataaatatgtcttcctcagttaaagaaatattatgccctttaatatagagcaaaagaaaaaactggccaagtgttctgtgtgagaagaatacgctgaatattcatctatgaacaatgagaggaatggcacccaagaaagggaactgtggaaaaatgaaagaccctcttgttttttgtctttcctttatacatgtataaaactgaacaaagaaaagaggcacaaaccctagtgtgtgttctactgaagaaaaacttgtttctgagagttgtccagttttgctaagtccccaaatagctatcctctaaggaaaaaaaaatattttgttttaaaggcaaagactcttggttacagaatacttccatgtaatgtaatgttcagtcttgcatatacggagattataggcaaggcatctttttggtcattttagaccatagcagtgcaggttttataggtacctttctgtactcttttgaggacaaaatgtgcatgttttcaaggcaggaaaccttgaaagttgggggatagttttgggcagtagcacagagttaatttctttgcagaccaactagagattgaaaccacgagcagatctattgaaatcccaagttctcatgacagtataggcccaaattctgcagagatctcaagtgctagaataggtggtttgaaaagtatcagagctccctgccttcatcctgacagtagcattaattttaaaatgactatattcctagataaaaacacacattttaaaaattttataaataacctgaatccttttgttctgacaatataataatgaagacataatattaataaatacaaattaatgttttttggagtttttaaaaatccatattgatttccaaaacgtttgtttctactgctgaaaagagaaattcaaaccacctgattgttcacagtaagtaaaattcagctacatatttatctttgatttcactagacaggtaatattgaaaaaaatgaaacatgcctgtcacctgacacttgcaaacataatatttgttaaacttagtgtttttgttgttgttttgttttgttttgttttttagtaggggcgtgctcactatgtttcccaggctaaccttaaacttctgagctcaagcaattttcccacctcagcctcccaagttgctgggattataggctcatatcaccacactcagcttcttaaacttagttgttttatgtttcctgttttaaattttagaaataaatggatttaactaaaacaatagcctttaattattgtagcagttttaagtttacaaaaaacaaacaaacaaaaaacaaacaaaaaaaaaacctggggagaaagtagagttcctgtatgcccattcacccttctcctccccacttttccccattattaactatggtggtacatttgttacaactaatgaaccaatattgatgcattattataactatagtacattagggttcactgggtgtacatttaatggattttgacaaatgcatgatgttatgtgcccaccatcataatatcatacaaattactttcactgccatagaaatcctctgtactctacctgtttatccctccccatttccaaaccctggcatcttttttacggtatctatagttttgccatttccagaatgtcatatagttggaatcatacgggatatagctgtttagactggtttatttcatttagcagtatgcacttaaggtttccctgtatagtttcatgattaatagctcacttctctttagtgctgaataatcttccattgtatggatgtagaaatttgttcatgcattcacctacttaaagacatcgtcgttgcctccaatttttttgcaattataaattgggctgctataaacatttatgtgtaggattttgtggaacataattttcaatgaaataccaatgagtatgattgctagatcatatggtaagtgtatgtttaattttttaagaaagtgccaaatagcattttgcattcccaccagcaatgagtgagagtttgtatttctccacatccttgacggcaattgttgttgccagtattttgagttttagccgttccaatagatgtttagtgatatctcattgttttaatttgcaattctctaatggcatattatgttgatcattttctatgcaggtttttcatctgcatttctttggtgagatgtctgttcagatcttttgctcacattttaatcaagttgtttttcttcttgagttttaatagtttttggtgtattttggatgacggtcgaatatcagaaatgtgtttagcaaatattttcttctagtctgtgatttgtctttcacaaatatggaagttttaattttaataaactctaacgtcaattatttctttcataaatctggcttgtggtgttatatctaagaccttattgccaaacccaagatcaactagatgttctcctatttatcttctaaaagttttacagttttgcattgtacatttaggtctatgatttattttgagttaaattttgtgaatttaatgtcagtgtctagattttttttcatgtggatgttcagttattggactatttgttgaaaagacttttgctctattgtattgcctttacttctttgtcaaagaacagttgactgtacttatgtgggtcaatttctggcctctctcttctgttccattgatctaagttgtatgtttgcaaataccacagtaccttgactcatgtagctatatagtaagccttggggttgggtagtgtcagcattctgactctttcttcaatattgtgtttcctattctagatcttttgcctctccatataaactttagaatcagtttgtgaatatccacaaaataactttgtgggattttgattgggattatgttgaatctaaaaattaaattgggaagaagtaatattttgatagtattgagtcttactatccatgaacatggaatatctctcagtttatttagttcttttttgatacctttgatcagagttttgtagttttcttcataatagatcttatacatattttgttagattttatatgaagaatttatttaattttttggttttagtgtaggtgttgtgctttcaattttacatttcaatatttaattggtaatatattgagacacaaattttgtatacctttaatgcctgactctcaatttctctttaaaaaaaaaatccctaaacttgtgtatgtatattaaattgctctttgcttccacatggttcccaattcttcttttttaatatgtgatttaaaaaaagctccccattttaaatttataatactgctattggtcaacagctcatatttttatttgaagtttattctggaatgtgtattaaatgtggtgtggtgtgtttccaaccatcttataagtctaattcatgtattccattggatataaaagagtaatctgacttctttatcttgtaggaatagagtgctagaatttatcttttcaaacttattttttcctgtttttaaagtgcttattttaacaaacctggaaaacactgaagagtataataaaattgttcagaagcctacaatacaagtaatagtttgaaatataggctcctttttttaacttgtgagaaatttgtttttttttttttttgatttgtgggaaattcatcaggtttagaatatgccacttcagatataatttttttcctcgtaatggtcaagaatttagtacatatcagatgaaagattttgctagttcacctaaatgtagacataagcatgtccctgctagtattgatggtattctcttgttgcaagaagtttatagtgttttcctgtgccagagcttttgggactgaagtcataggacttgttatatattctcagaattctctgctgacctagtagtgggggccacatttttctttaaaaatatataatgaggttttttgtttgtttgcttttggagaccagtttatccagatatatagcatttggaacctggtaaattacttttggcagcacatcactgagtaacactgagttaaatgtttatgagtcgcacataaggtaaagtagctgttttcaaagtgttaagttctctttggtcttgtccacaacatggatactgagaggtcctgataggccaatgtttcttttgaatatagccaacctatggagagaaaaatctgttaagtgtttctaggggttgggcaatgtgaaagggtattggtaagttatggtgaactggactcaaaatattactggaaaagaaaacagtccacaaaactaacaggaaactgttactttaaatcctttattttaaaattataatattccccttaaagacttctagcggtggggtgggagaatacaaaatatttaattttataaaagaaatagtctgctaatttacaaataatttaaaaatgaattagtcaatatttaaaatattaaataatgtgctgtaatcaacatttaaaatcatctacattcagatctgttatcctaaaattatcagtaatataatatgccttagaagaaaaaccagaagaatttgcctcttataagcactttagagcaactatttgataacagtgccttcaaagttaaatattagatggtattgccagatggatctcatatggtaaatagcactctacgagatggcattttattttgctattttttttttaaatgaaagtccaacactaaatagtctaggtcattaaatgaattcagagttatgccttaaacaaatataacattgcaacataaattgacaaaggccaatgaattcaaagttgatgctgactttttccattttatttaaattatgcaatagcttcagttatcattgagaattgttttattatttctattgttgttgctaacataccttttgaccaaaatatctccaaatatttggctgcatattgtatattatagaggcagttaaaaaacaatgatagctgaaacgcttggagaggtggtagtataaagaaaacttaaatgtagcttgaaactcttttttctttatgggaaagagaacacttcattcaactatatttttcctgacataacaaatatatagcactgttttcaagctagttaccacagttcttgggccaagaaaatagagatgtttcattttagaaaaaatattggtatcgaatataaatatttgaggaaattccttctaagaataaagaacttttcgagggaaaaacagtaagtaaaaaaaaagtaggtttaaagaaagaaaagctgataagtttgcattaagttttatatagcacaaattatatgtaatgagtacatgatatttgaagtttttacatgtgccctcaatttgtgcaagttccttccttcctctcttccatctttctgtccttccattctttctgttttgccctgaaaatttccctccccctttcatttccctccccctttcctttcctttcatttccctcctcctttcctttccttcctgctttcatttccctccccctttcctttcctttcatttccctcctcctttcctttccttcctcctttcctttccctctccctttccctttctctctccctctccctttcccccttcctcttccccttcccttccctttccttcctcctttcatttccctgctcctctcctctcctctgctctcctctcctctcctttcccctccttttccctcccctcccctccccaacctcccctcctttcccctccttttccctccactatcctcattcttttctcttgacttcgatgataccatattctgattgatcttacccaattttctggcttcagttactatatatggatcaattacagccacatctttatcttaaacaagatcctcttcctgaacctcagactccaataccaaattaccttctagacatcttcatttgaataacccataagtaacttgacatataaagaaataaacttagcacatccaagccacttctctcatgattcacatctctgtgaatgatattaccaccaacccagatatccaagtcaggtaagctcagcttgatcccttcctgactaccacattcagttaactaccatattcttttgaatctacatctttgaaattatccactctgctgcatatctagagtcactattctattctacatcatcatgctttaccttagttattgaaataatattctaatgcctcttctttcttcagttatgcacccctgtttttatttgagataaagggaaacatgaaacagtctgccatgtgactttatcacttaatactcttcagtagtttcccattactcttatgattaagtctagttattttcagaggtttcagaaggtcaggcatataaagaggtcacaaattcttttgtgatggcacaacagctttgtatcttgatttttttggtggttatatcaatacatgtgatacaaagacgtacaaaaaatgagtgcatgcacaaattgatgaaatccaaataaaatttgttgtttattttattgtactaggtcaacttcctcattttcataatgtacatggttatgtaagatggtaccaatgtggaaagctgggtaacgggtaaatttgacctatctatactaatttgcaacttcatgtgtgtatataatcacttcaaaataaaaagaagttaatttgcttgactgtagtaatcatttcactatttatagttatatcaaaacatgctgagcaccttaaatatatcctaaaaaaataaatgatttcaaaaatgaaatctatccatttctagctggctaatgttgaacaaattatttaccctttctacctttgctccttcttctccccagcagactacattatcatctagtcaaaaaaaagtagacacatccatctaagtacatgcttaacatcccaagataaaatctgtaaatatcctgggtcagctgggtgggactagctagtggtatcctcttttcatgaagttttgtaaaaagaaattaacctaccacttaaaaagactaatctgtttacctatgttttgaacactaattctacttttttagaaattttgcagtattgattaattttatcttttctatgtcttcatgctttgtctctttgtaaactcctttgttatcaacattcgaacttgttcaagcccttcactattttttttttaaagaaaagaaaaagaaaactctttcctaacatttcaatctgtcttgaaaaattactttatttctttggaaaccattgtttttattgtttgctttttgacttttcatgtattatttggattatactaatcatgttactgaatctaatggacacttaaaaatttgttttacacataccataaaatttcacacatttcaagaatagagtttagcatattcgcaaggttgtacaaacatcaccactatctaattccagaacgttttaatcaccccaaaggttctacactgtggatctagcagtcattcctggagatccatgctcttgtcttccagtgatttgtaactacctgattatctctccacataatactctaccaaaaacatggtgatactggagatttctctctttgtcttctgttttccaagttaaacctctctagttgcctcaactgcccctactgtttaagatttctcaccattcttgaggaattgccacactgtcttccacaatggttgaactaatttacactcccaccaacagggtaaaagcgttcctatttctccacatcctcttcagcatctgttgtttcctgactttttaatgatcaccattctaactggcatgagatggtatcttactgtggttttgatttgcatttctctaatgaccagtgatgatgagcttttttttccatgtttattggctgcataaatgtcttcttttgagaaatgtctgttcatatccttcacccactctctgatggggttgtttgtttttatcttgtatctagaactagaaataccacatgatctaggaatcccattactgggtatatacccaaaggattataaatcattctactataaagacatatgtgtatgttataaaaaatacacgtatgtttattgtggcactgttcacaataacaaagacttggaaccaacccaaatgcccatcaatgatagactggataaagaaaatgtggcacatatacaccatggaatactatgcagccataaaaatggatgagttcatgttctttgcagggacatggatgaagctggaaaccatcattctcagcaaactaacacaagaacagaaaaccagacaccacgtgttctcactcataagtgggatttgaacaatgagaacacatggacacagggaggggaacatcacacaccagggccttttggggggtgggaggctaggggagggatagcattaggagaaatacctcatgtagatgacaggttgatgggtgcagcaagccaccatggcatatgtatacctatgtaacaaacctgcatgttctacacatgtaccccggagcttaaagcataataataaaaaaaagaaaagaaaaaaataagatttctcaccattctacatgtttttctctttaggctttttgataaggcagtgtcctcataataaaagacatgtgccatgatctggccagttcagagtaaggtgggataattgctatcttatttactttattattgtagctcatgttattattgtggaacttctttgatccttgactgatacatggaacttctgacatttgctgacattccctctatagtttcctgcttctaatgaataatattaattttattttgaaaagttggggttgggagaaggtaaaggggagatggatgtgaggaactggcatacgtgactaacacaaacttaatgtacatctggcataatcatcagttaattcaatgtagtttcatttttgacttggttagtatcctacaaaataaatatattaatactaagtttgaaaatgagtatatttcttgcaatagaccagagatttgtggggtttgggatagcactaaatgaatacatgttatgttctatcatactatggtattattttcaataactgaaatgagaaaataagtatattttgaagaagtgaatagaaagcacttatatctgatttctgctgagattttttcaaagttactaaataaaagcagcatttgtgacttagggtgaagcttatgaaataggggtctttatatgattttttgtctttaaatgttaagactactctgaatggatagtttaatgattctaaatggaaactagaaaagcaggtctaacagtaaccagatgtcctgggatttagaatggcatgctaaaagtagaaacctatatgaagcttttgaaaactcacaatgcttgtcatttcttattttcttttatgaactatttcaaaagtataataaggcacgaaattaatgtaataaataccaaatacccatcacccatattttaaaaacattagcatttgccatatttgcttgaattttgtttttacagaaattagtcattgcagaaatagttgaagttcccttgtgtttacagttccaccttttgtccctagaggtaaccactcttctgaagttaatgcatatgctttcagttcatatttttactatttttatattttcatttcatttcatgcagcacatgcgcacacacttatccatgaacattcggtgcagttttgtttacttaaaaatttacataagtcatttctcaccataatgccatggtttgcaatctatgttccaaggcactcctgtagggccacagtgaactcacaggtgggccatgagctatttaaaatttttaagagaaacgtagcaatattcaacatctgtcagacaccaggtcagacactaccctgaatagttcagttttagcgtgggatttcagtaaattcatcctgatggtgtcatgtcttcgtgaagcttggtttttgtggttgctgtcatagaaagcaggtactgcatgaaaatcaatatagaacaggaaataagtgtggcagtgtccaatcagatttcaaggtttgaaaagttgtgcagtgcctgacaggcacacacatcccaataataataaacttaaagatggctatataagaatgaagtaaaaataatttttaaaaatttgtgtttattatttctatatggctgtattgctgggacaaaaatacttatttaattgtttagacctaagtactaaattaatggatctgttacatacttttaagctaagtttgttgtgaaaatattactaagacactaagtgctctgagaaaaaagtaagaagacagtgaagtttggatatttatttttctttctgtaatagtttatatcaggctacgattatccattccttaaaggcttggcaggattcaactgttaaaccatgtgagatgtaacttgtcaggagattattttttctctcaattattgatcataaatttattcaggttttctatttctaattacatatttttcttacatttcatgtttctaggaaactgcttatttcatttgagtttgtaaattgattgccatttagttgtttagtatattctcaggttattttaaatctttcctatattgtttgagatacattctctttattcctaaagtttctaatcagtgcctctattttctttcttaaatatttaatgattaatattttttgatcagcataagttttactatgggttgaatactgaaaaaataatatggtttagcctaatatattacacctcttcttaaagaacaaattttggttttgctgatactctctattgtacatttgtttcatgttattaatttttgttctaatcattattctttccttctcttttacatggattattctgctattattttttaacttgctaagtgagatcctaaactaattaattttacgtatttaaaaaatctaatatatgcatttaaagccataaattttccactaagaaccactttagctgcatcccacaggttttgatatgtagtgcctttattgtgttcattttaaataattaatatttcaattatgatttcttctttgactcatggaatatttatgaatgtttttttagtttctaaatatatagggctttttaatctatcttttcatcttaatttcttattttattccattgtggtcagataccttattttgtaataccaattctttggtatttgttaacacctctttttagatcataatggttgaattttataaatattacacattagttggaaagaatgtgcaattttcaaaaggtgaagtttttacacatcagttagttcaaaatgatgtaatttaaatcttctatatctttactaattgtattctttcctgttgatgtatcttctgcctcatgactcactcctttactttgttcagggttctgctcaaatatcaccttcttagagtctttctataaatattttttctacatatctgtttctccatctcttcttctattttcttttgtactgcttttctcttgtggcatttgttagtactgaacattatattttatatttctgtattcattgtcttcctcatgagagtataaacaggaattatgttttattcactaatatatcttcagggtctaaaatattatctgcctaaaaaagcatttaataggtagatgttgaattgaacaaaagagtatcagtttttgatcctatggttagctcattctcaggtgaagaaagttgttttctctgtgagtgccttgggtccttccaaagtaatttagtatttccttctattctgtgacccatgatctgtgcctgtactggtctacagaaaacctaattggttttgtgttaatttttagctttgagttttctgtcccaaataatgcaatgctgattcctaaggcactcatggcacgtatctgggtttcattttctatgtttttttttcccccagaaccctaagaagatttctagttttattactctgtctctgggctagtctatagacctatagacttttctagtctaaatcttacagatgcgtgaggggacatccattaataagtgggagtctcagcttctgttccactcctctcattggcttcaggctttgtctgtttccccacactgcggacaaatatatggatatatgtggctatggtgctctagggggacaccaagagttcagccccaccttctgctctggctttgagttctttctttttgtctgacacccagagatttccctttatagctttcattctaacttgtttcacttcttaattagcaacatcatactgaatatctctttatatgaaaagaaagagagatacaactctgtcagctgaatctccctgtcttgacttttaatagtttttttaggttatttatgctaatctttatgattgcttatagcctaataatttttctatagaagtgcatagtatgtatatgattaatatatttagcacttgatttggatcatgttgccctaatttttcagttgctgacatatttactcttgcactttcacatcaataatcatatgtgagtgataaaattacatctcctttaagttagcagttagcatcatacagtgagtatttatttgtgagagagagtgggtatgtctagtggagggagtaaaaaagacagaaagagagagaagttgaaaagtttaggtggagagagagattattacaaaaaaaaagtttaggagagaaagagagataagaacgtgcatagacacataggctcaaaataaagggatggaggaagatctacggagcaaatggaaaacaaaaaaaggcagtggttgcaatcctagtctctgataaaacagactttacaccaacaaagatcaaaagagacaaagaaggccattacatgatggtaaagggatcaattcaaaaagaagagctaactatcctaaatatatatgcacccaatacaggagcacccagattcataaagcaagtccttagagacctacaaagagacttagactcccacataataataatgggagactttaacaccccactgttaacattagacagatcaacgagacagaaagttaaaaaggatatccaggatttgaactcagctctgcaccaagcagacctaatagacatctacagaactctccaccccaaatcaacagaatatacattcttctcagcaccacatcgcacttattccaaaattgaccacatagttggaagtaaagcactcctcagcaaatgtaaaagaacagaaattataacaaactttctctcagaccacagtgcaatcaaactagaactcgggattaagaaactcactcaaaaccactcaactacggaaactgaataacctgctcctgagtgactactgggtacctaacgaaatgaaggcagaaataaagatgttctttgaaaccaatgagaacaaagacacagcatactagaatctctgggacacattcaaagaagtgtgtagagggaaatttatagcaccaaatgcccacaagagaaagcaggaaagatccaaaattgacacccgaacatcacaattaaaagaactagagaagcaagagcaaaagcgttcaaaagctagcagaaggcaagaaatcactaagatcagagcagaactgaaggagatagagacacaaaaaacccttcaaaaaatcaatgaatccaggagctggttttttgaaaagatcaacaaaattggtagactgctagcaagagtaataaagaagaaaagagaaaagaatcaaatagacgcaataaaaaatgataaaggggatatcaccatcgattccacagaaatacaaactaccatcagagaatactataaacacctctatgcaaataaactagaaaatctagcagaaatggataaattcctgaacacacacactctcccaagactaaactaggaagaagttaaatccgtgaatagaccaataacacgctctgaaattgaggcaataattaatagcctaccaaccaaaaaaagtccaggaccagacggatccacagccgaattctaccagaggtacaaggaggagctggtaccattcctcctgaaactattccaatcaatagaaaaagagggaatcctccctaactcattttatgaggccagcatcatcctgataccaaagcctggcagagacaccacaaaaaaagagaattttagaccaatatccctgatgaaaacatcgatgcaaaaatcctcaataaaatactggcaaaccgaatccagcagcacatcaaaaagcttatccaccatgatcaagtgggcttcatccctgagatgcaaggctggttcaacatacacaaatcaataaacgtaatccagcatataaacagaaccaaagacaaaaaccacatgattatctcaatagatgcagaaaaggcctttgacaaaattcaacaacccttcatgctaaaaactctcaataaattaggtattgatgggatgtatctcaaaataatgagagctatttatgataaacccacagccaatatcatactgaatgggcaaaaactggaagcattccctttgaaaacgggcacaagacagggatgccctctctcaccactcctattcaacatagtgttggaagttctggccagggcaatcaggcaggagaaataaatacagggtattcaattaggaaaagaggaagtcaaattgtccctgtttgcagatgacatgattgtatatttagaaaaccccatcatctcagcccaaaatctccttaagctgataagcaacttcagcaaagtctcaggatacaaaatcaatgtgcaaaaatcacgaacattcttatacaccaataacagacaaacagaaagccagatcatgagtgaactcccattcacaattgcttcaaagagagtaaaatacctaggaatccaacttacaagggatgtgaaggacctcttcaaggacaactacaaaccactgctcaacgaaataaaagaggacacaaacaaatggaagaacattccatgctcatggataggaagaatcaatatcatgaaaatggccatactgtcctgcgtaatttatatattcaatgccatccccctcaagttaccaatgactttcttcacagaattgggaaaaaactagtttaaaattcatatggaaccaaaaaagagcccacattgccaagacaatcttaagccaaaagaacaaagctggaggcatcacactaactgacttcaaactatactacaaggctacagtaaccaaacagcatggtgctgctaccaaaacagagagatagagcaatggaacagaacagagccctcagaaataataccacacatctacaaccatctgatatttgacaaacctgacaaaaacaagaaatagggaaaggattccctatttaataaatggtgctgggaaaactggctagccatctgtagaaagctgaaactggatcccttccttacgccttatacaaaaattaattcaagatggattaaagacttaaatgttagacctaaaaccataaaaatcctagaagaaaacctaggcaataccattcaggacataggcatgggcaaggacttcatgtctaaaacaccaaaagcaatggcaacaaaagccaaaattaacaaatgggatctaattaaactaaagagcttctgcacagcaaaagaaactaccatcagagtgaacaggcaacctacagaatgggagaaaatttttacaatctactcttctgacaaagggctaatatccagaatctacaaagaactcaaacaaatttacaagaagaaaacaaacaactccatcaaaaactgggcgaaggatgtgaacagacacttctcaaaagaagacatttatgcagccaacagagacatgaaaaaatgctcatcatcactggccatcagagaaatgcaaatcaaaaccacaatgagacaccatctcacaccagttagaatggcgatcattaaaaagtcaggaaacaacaggtgctggagaggatgtggagaaataggaacacttttacactgttggtgggactgtaaactagttcaaccattgtggaagacagtctggcaattcctcaaggatctagaactagaaataccatttgacccagccatctcattactgagtatatacccaaaggattataaatcatgctgctgtaaagacacatgcacacgtatgcttattgcggcactattcacaatagcaaagacttggaatcaacccaaatgtccatcaatgatagactggattaagaaaatgtggcacatatacaccatggaatactatgcagccataaaaaagatgagttcatgtcctttgtagggacatggatgaagctggaaaccatcattctcagcaaactatcacaaggacaaaaaaccaaacaccgcatgttctcactcttaggtggggaattgaacaatgagaacacgtggacaccggaaggggaacatcacaccccggggcctgtcatggggttgggggaggggggagggaggggtagcattaggagatatacctaatgtaaatgacgagttaatgggtgcagcacaccaacatggtacatgtatacatatgtagcaaacctgcacattgtgcacatgtaccctagaacttaaagcataattaaaaaaaaaaaaaaaaagaaactggataccatcacttgcaatgtgaaaaaaacaataaataaaaagtttctttcaaaaaaagaaaaaaaaagaagacgatagggaatagatgagatggcattgataagacagtttgtacctagacaagacttacctttggcaaggttggtttaattcttttcagtgatgcagataaactagcagaggcagataaattatttcaattctaatcttccctccctttcaacatgttgtacctgacttctacatgtagctaaacaggtactttttgctgatacctgagtgatgttgaagggtttgcacttacactcaacttttggcactttattatttgtgctgtattcatgtctacagggagaaattggtccctctgagtacagagcaagtgactgtcagcttgactgtgtttgaaagctcctatcctatcatgtgatattatcaggaaccaaggattagcaaacctatgttattttggaaatacttttcttcagcatgctgaacaaacagcaagagcataggtaataaagctattgaaacctcacaagtgaaatgtgagcacttcatcctcttttgaaaatattgcaacgttttgtgatttctccttcatatgaggaaagagaaagaatctttccaattatttctttaatgaatcagttactttgtggagcttttgaaaatgtaatttttcagatagattcaacagtcttacccctattgtgtaacttagtagtaagctttctgcattcattgtacctgggaaggtcaagcattttatgacctcaaaagcctgattcttgtttcatagagacaattacctaaaagttcccgttatttaaaatggatatttcaaccatctcaaggtttacttttactgggattctcaagtggttttatttattgaatactgaatcaaactgaagcagactttatcatgttatctaaaatcttactttatgtattttctcattttattttaaaaatcatggttgtatgacatgctgatataatttaatggtaaactttacatttagattttatagttttagcatttttgtcaaaccctagttgaagctacaaaaatattttgacactatagctagaatagataaagcagaattggatgtcagaagcatagagtacaatttattggttatcatgattagacgggctgataatgaaagctgattggcagtaggatttattacagaaactataagatggagaatagaaaatgataacattgctaattaatatgtaatgtatcttatgacagtgtgttatcatttagaatctttactaaattttagtttaattgtgtggctgttttggtgttaaaacacaattttgaaaaacatataatgcgtttaaaataccttttgaaagtagctatcaaccagaaacaggtaaaggtgtatttattatactttggataaaggtatattccaattgggaaatttggaagacctaaaagattttgagggagaaagaattgttataatagatgtaaatgtaatgttgaatggcttacagggtatctgacaacattctcataaaacattgtaagagaaatcagtaaacatcttgaagacaaaggaatcatgagcgatgaaaaaaatgagtttattataaacaaatcttgcctgacaaaattaataatgtttgaaatagaatgcagaattagcatggttaaggggaatgtatattttgaacttcaaccgagtgtttgttgtagcttttcaaaaataattgtagaattacgatataaataatctgatggataaaatatgcagagaaagctgatgaatctatagaaggccaaaatgtaatgccaagaacaccctcaaatggattgcaggattaggcggcagtgataagagtgacctgaggggttcagttttcccgtaatcttttccaacccccccatacacatatatttcatataaaagcaaaatgtgtatcacagaaaagcagattctaacacaagtcctcctaacacactttctgatcaaattttctttctaaatctccccatatataaactttggaggcttcactgatgggttagatcagggtttgccaaatgcatcccacccccttctgtaaacaaagttttattggagtacagccatggtcatttgtttatatgtttattgcttatggctgctttcagactatagtagcagaattgagtagttgaaacagaaactttatgacctgcaaaggctaaaatatttattatttggcactttatagataaaggtcctggtttaaatgaatggatgttttcacctgtagaggcattagaacgcttgtcaaggctaggtatagtcaggatatttgtacattgtatgaatgtgggagggagtgaacatgtaaagattcagggtttggtctcaccccgaatcttaccatgtttcatcattttgacccatctattttggcagtaaaggtcccaaattgggtatgtgtcgttgtaactactttcattcagttccattcaattgtttttgacatcataaaaggacataatgacatatcaaaagtttaatggggaagtgtgaaggaaacaatagctgagaagaacaatgttgttaatcttatgtattaatacattttaggtctaatgtggtaggaatatattttgtttagaactttttcaaaataagcttcatccacttgatcttggacctatctcttaaatggacttactgtgccccattaatgctgagagacagagcatttttcatcctaggattcaactgaaaaaagaactaccttgcacattgtaagcacttgaaaactatttatggctaacgatttctgtaaattcatttattcgttactcagatctatcagtgcttactatgtgccaggcatgacacctaggggcaagtgatttggcagagaataagacagatagcctccttaatgtaggaaaatcgacaatgagtcagtttataaataagtaaaatagttgcagatagtgatatcctgtgaagaaaagaaatctgggcagtgggatcaaaagtgacttgggtcagatagggtggatagtgggataaagagtaaccacgtgccatttgagttgaggactgaatgatgagaaggggaagccatcatgaaatgatctgggagaagagccttgtagaaaagcgtgttcaaaagccccaaacaagcatggcctgatgaaggaagacaaaaaaggtagtgtggctggattttagtaaaacagttggtgtgtagggatgtgtgagtgtatgtttgtttctgtgtctgtgtgagagtgctcttgggaacaggacattaaattagctccttgtttgttttcttaggtactcaattgattagtcttttctaaacataaatgtatgtttctgatctaaaatgagagttattgaattgattgtatctgaatcaactgttgttcaatgaaagagaaggccattcataggtgtcttgatagaaataagagtgagaagagagaatacactgagatagtgaaagtttgggagaaattgggaattaggacttggttctttggctccaagaccaaagagaagcttatttggaatgtcactacatgggtctgggtagttgttgtgcatcctgatggagcagagacttgttcacagaaaatggtgacggagcagggacatttaaagaaagctgtctcctgttgttggagggaggatttgagaaaaggacaaagatttttaaaaaatgactagttactgggtccagcacaccaacaaggcacatgtatacatatgtaactaaactgcgcattgtgcacatgtaccctaaaacttaaagtataataaaaatatatatatgtataattgatttttaacaagaaaaagattaggactgggaatgggccaggctcaataactgaaaagagacatcctaaaccctgtgatctccatcatcaatgccagtctcacagaagaaaaataagttgttggtagatggactggattatgatgtgggaggatgacatgttcaaattaaaccaggaaatggaaggagtgtgtatcatatcaatacacctttggggagaagaaagaaaaaagtaaattcagagagcaaaactggctttggataagaacgtcaactgggcaataatatagcaaaggaaatcgtttcgttttaaaaagcattactgtaatgcttattgaagcagttgtgaaaaacctgaaaaccgtgagtttatgcaaagacacatttttgaaactagaaaataacaagaggtctataacaaacgtatggaaaatttctaagcatttaaaacctataattgaaaattcagttaatttagtttaacaaattacttaaaatttaaactctgttggctgtattttggcttaaatgtaaaaattcctagtctatagctgttaatatattttatatcacagataggcaaaagtctatgccttaattgaaaggatgaagcctttcatatcagtctgaagccaaaagttacacacaaacttctttccttttttgacttgcttggatcagatactgatcaggtgctttgcttgggtacagacttgagagttttactattagctttcatcagctttttcaacattgacctttgaccatgaaatatgaagacaagaacggccttgagaaacaatgcttctccggttctaaatctggttcctcggtgtaattatatatcatgctttaatttctctaactggcatttctcgagttaaaattaatttgagttcactatgaatttaacagaaattgacagagtagagacgaatacctcatgctgaactatataggaaggacatcgtgaaggacatgttgagggcataggaaaagcctgatatatatgtgaaaatatttcagctacatgaacactgcatgacacattgtaaacccaataattgtttgctgaaacaatgtatatttatttaaaatcttatttcattgggtgagacagtataatttctgcattatttggaattaggatatataatggaactagattatggaggaatttgaaaaccaagtatataggacttgatactgtaaatcattaggaattattataggaaataactagattatttccaaatatttgttttattatggtgtgtaggatgatatagagatagatagaggcaaaggatgatattttattccaggcatacttttatattaaaccaggttctcattcccagcctagcttggctgcattgaaatgaatttcttcataaaagtctataggtctaatgtaaaaaaaaactttggactttggagggaggatttgagaaaaggacaaagatttttaaaaaatgacgagttactgggtgcagcacactaacaaggcacatgtatacatatgtaactaaactgcgtgttgtgcacatgtacccacaggactttgaacattctgctttattgtgcccttttatacttgtgtctcactggtacctgcctgtttgcatttattttagggagtaattcaataaaaattaaatggaatgaatttataactaaaacctgttctgtgcaaaccataaggatgggatttatttattttatttattttttaagtcagccttttctcttcatggaattactcaatgtgtaaagattggtacactaaaagcaaatcctgcattacaaattggttgctgtctttggtagcaatctgccaagaggatatttcaagaaaatagtcatactgcaaatttggccccttgctggccctcattaagtatgcattttactttgacatgttatttcatagaaatgatttaggactagaaattaaaagttgtatcgactggtgtacctctcatcagatgaattaggaatagcagacaatcctgcctttgagaagttattatgataatattgcccatttatactgttgtcttggttgcctttggaatataatcattcacatatttatcccatgaaaactatttccaaaaaggaaatgagaggtcagctttgattgtataattccacacttactagctggtggtaccttagttttttaatttttggcattgactctgggaaatttactatggtataaaactgccagctgcacaaaggtggggccagttttgtcagcatcttatgaacaattcaccaaatgaatttttctgggaaaaccagtatgaaagttccttgcatggtagtgaagaagtagacttgtgttaaatataataacacacaagaaaaaccatcaactcatgaaagattgaagaactcatgaaagattaaagctggaaatggaacatggtctgtaggaatccgaactctgcaaccagattgacgggggcataaatcctggttctgccgctcagtaaaagggtgtcctttggcaaattacttactccctctgttccttagtttacacattgataaagtgggtatgatgatattacctacctcctagagtttttgttaggtttaaataagtaaatacaaataaaagcgctttgaacagaacctgaatatggggactgctcatgtatttgctattatctgttaatctttagaagtaaagatgaaaattaaatagatttctctttgactctgccttctattgttacaaaaatataggaagaaaattgctgtcacttctaaaatgtggaatgattttaaagcagcactattttgtttcaaagctcaaataccttgtaatgcaattgtccttaaaggaaacatatttaacctttaaccaagactaaattaacaagaattgtttttacacaccccttttagaagaaaggttacaaatcataacaaaatagctcattattaggcctgtcttctgaaggaacttcaaacattctccttttgtcctgggggttactgtatgagtgcaatctcctatgtctagttatttagaattctgtaaaattagaaagcaaggggtttttattgggtctctggatccctggaaatttcatacaaaatttcgtgatcatatgcacttttctagagaaaaaagattcttggttttttttcatcgtcccagaggcccttctgacttcccaaaagttcaagagccatcctctaaggcaacataattttttcattttaagtgaaagataaaattataattccctatttactaaagcagagaaatctagtagaacatcttatatttttagttaaaatgatctaaaaacaaaaacacctttccccctagaacccttagctaaccagaacatttaactaaccaacatttcaggtaatcaatggttacttgcatcaagcagcaatctttcttcagtgattagctacgctggtgaaaatagtccagtcttatctggagaaaatggtgattttttaatttattcattctttttttcttgaagtttcaaaattattaatatttttatagtttcataattatacatttcttatggtatactcaggaataagagtattctataaatgcttacttcaaaactattatatcaatctaatataatttagtactgaatatttctgctcatggtggagtgaaatatctgacagaagactagggaaagctggaagaaaaataattttactgacctgtgaaatttaaaaaaagtcttctattttttatgaacttatgtaaatgtttaagtgcatatttaccttggtattttaaaattgcttttactaaaatggctaaatagatttttaaataattgttttatggacccttagaaaggatatacatttcaagcccaaaaactttaaagtttttagttgaaggggattaagtaaataatttagaagttcattgtgtttacctgttaataattaagcaggttagattgtgtactttttatagtcactgagttttaatttatttatttgttgatgtgttggtttttaagaatttatttaaggcattctgctcttgggaaataaaaataaacagaatgaagcttcacataataaaaggaagggctcgggttacttttaaacagacaagtaaagaaaaaaattgattgtattttagagttaaaaacagtatttagtacctaatctttctgtactttttccccctatttagaagcgaacctgaaatacctaagagcaagtataactgagtcagtgaatggtcttttgttgttgctctcgagctccagctccatggaatttgactttatttcagatggctttagtatggggtttagccagaccaatcttatgaaatgttctttgagaatataccatagaacttaccagatttccctggtgttttaaaaactctaataatatatccaaatccaaaatgaatacctccaccttaggatgcatgattatggatgaactgaaattaaagcttttccagtctttgaaggaatgtatccttgtcttcttgacgatggaactgtacaggttctttatgatctttcaggatgatcaattggctttcatttgccttttaaaataaaatacaattaaaccttatgtttaaatttttatttaatgaagacttgtttgctataattattaatagataatggtctttaacagtttctattcattttgtactcattgggaaggccttatacaaaataatgtccattgaaacaattaaccagaagtcatagttcatatgttgtagggtcatatgttttgaatgacatgttaaggactatggattgaaaatttcttatatgggaatgaacagcatgattttatagctacttaaaatttgcttactttaaacttttacttaattgaaatttatactactcctatttccaaaactgatttggagcatcttatgttctcatggtgtattttgtctctctttatacagtagtcctatcattgaaatcgatgaacatttcatctattttctcttgtaaaagtatgttcacagtataaatgtaacctccaacttaagttttctacattccaggctgtgcttttctttgaaagtttaattggagatgttaccagttaaaatttggttgctaggaacctaatagataccattctgagtagttgctgttatctttataaatcctatttttctttctttgttgttctcttcccttcctcacgatacctgccctttctcctttccttccttacatttttttttctctaaaaaaatctatgcagttaaaaaggtttcaccaaaaatgacagatagacattttcaaatgtctttcttaacattcaggaattctaataatataaattaaatttttctttcctgaaacataaactaggtgccttctttagtgctttttatgtttataaaaagtaatttgtttttattacagaaaatttggaaacaaattctaagaagaaaaaaactgtcataatcttaagataaattcaaagaataatgtagtttaagttttttacagtcacatacatactttttctaatgcacacacaagcacacacacacacacacacctggtacatacagatctatacttacatatgcacataaccaaaagttgtgcatagtctgtatttatattatatagagaaaaattattaaatattggtatggtatgttatcattattaccattttataacctgttttctaagcttaatgatgtattatatattttcacttgccatgtctaatgaacacttaatatcctattacatataatttatctaaccagttcactattctaaaatattttagtttatttaatttgcatttctttcattgctattgcagattaatattatttcatatgtattttagcttcttatttcaccttattacttataggtattagaattaataatattatttaataataaatagtaataagtattactattttatatatagtttaaaatatattttatatatgtttaaatatatttataaatgcattccatattttagaagagaactcacaattctattgtgaattgcctattcatgtattttgctcattttaaaaagtagaataatatgtttatttatttataaagactcttaacccaatgaacattatacactttaaaaatatttattttttattggcctcttaagtttgaattttgttaaagatgttttctgccttacactttttttttttttttttttgagactgggtcttgttctcttgcccatactggagtacagtggcaggatcatggttcactgtagccttgacctctccaggctcaggtgatcctcccacctcagcctcctgagtagctgggactacagttgtgcaccaccatgtccaactaatttttgtattttttgtggagacagggtttcaccatgttgcccaggctaaaatttttaattttaagtagtaaacatcataaatctttatgcttatattatataccactgtgtatgtactttaaaagtccttcccacattggagttcagaaaattatacatatgtattttcttagaggtccttgattgttttatatattatattgagttttattgacctgatttatattttagtactgataagaattagagaacagaatttattttgccacaggtaatcagtcagctatctcaacattgttcatggaaatgttacttgtaacatttaccccatacctaagttcccctggcctcttctactgatctatctcttccaatgccaatatcacactgtcacttatatttaactctttggaaagaacctaccttgttctctgcttctttgctataggactcaaacctaatgcttgatgttttctcatttaaatttgttttttaagtttgtcagtcccctggtttgttgttattgttttgagctagctttaaagcatcaaaactactaaacatcattttagttcatttcaggacaacaaagatttttttgattatttgttacatagcaaggcttgtgcttgcattaggaatacataaatgaatcagatatctgtgtagcaatgtcccttcactggaaaaatgtgttaatctgatggagtcagacagcatgtaaatagtaaagagagtggcctcatgttaataacttaattttcttctgattctttcttattcttttgttatctatgacttcttggccctagccatttaatatattttcccctttttcttttttttttaatttaggaaaggtgaaatattatgtgaaattgatttaacagagtttgattgattcaggtatacgaaagatggtgactttttcatattcatgtagtctgtttattttctaattaatgaactgaaaattgtgtctttctatttttgttctctaagtgtttattgagctcttgctaggcactatttaaggaaccttaaggaaaataacagtaaatgcctttgacaatgtaatctagtggggaaacataatttataaaaatattagcaatataataaaaagtattgagtacactgtttggtatatgctggccattatactaggcaaggaaatatgtattatttaatcctaaaacaattcaaacggtccttcagatttttttttttttttgaggcggagttttgctcttatcacccaggctgaagggcagtggcgcgatcttggctcactgcaacctccacctcttaggatcaagcaattctcctgcttcagcctcctgagtagctgggattacaggtgcccgccaccacgcccggctaattttttgtattttagtagagatggggtttcgccatgttgagcaggctggtcttgaacttctgacctcaggtgatccgcctgcctcggcctcccgaactgctgggattacaggtgtgagccacctcacccagccagtccttcagatttttttgttttgactgtcttctttacttgattcaggtttcttattattcttacgtcctttgagaagtttccctgtccaaatctatctaaaatatcaggccaggtaactctcagtgtcattatcttgttttatctgacttcatagtactaattatatgacattataagtctaacagtttatttgtttattgtctgtttctcctgttgctagaatgaatattgaatggaagaataaagaatgcattgtagaagtttgtagttgcagaatgacaatttaatttggtgtacatgatttaatttctttaagcctaaatttctcatctgtaaatagatacagatttagtgcctgttttattggttaggctgttcattcattcactgagtacatattcattgatatcctagtatatggcaggcactattcaagaaaatggggttacagtgaaaaagagaaagtgcctgcccttatgttacttccattctagaggaagagacaggtaataaattaataaaagtaacttttgtaatatatcatgtagttaccaaattaattttctcaaaggtgtcctccactttatctctatgatcagaacattttttcttttctgttcctaatcatcctatttcttcatcattaattgttctggtctcactcctcctagcagttactaacttttagcatccctcctagtttgctgatgcagaataactgtaataatgctgatgcaccccaaatataacaggagtgtcagattccttttctggaccctatttgtctattagtgcaaccaatccttaggtttgttttggtttactagtgtggtttgttgtttgcaaaaatactgtgcatgcatattaatgatatagtcaattaaaatcctcagatttttaaaattttaatgggcattttactgtagatgtactagattatataatcaagcatatgtttaggtattgcatttccattattaaaactgcttttgaaactttgaatgcctaaatctctgtggagattattagtaaatgtggcatcaaggtcatcattgagatttcatagcaaatttagagagatcattttctaatgggaacacaacatcaaattcaatttttaataggagagctgtttttagttaaatctttctatagtcaaaatcaccaaattggctttaaagtaaactcaacatcctgcctgttcccatccagcttcaattctttactaaagaaatttaaaagcaacccatccatttgtttggcatccttgcatctaaatatgggtaggaccctactattagcctttctgctaaaacaggaaatattaagccatgttttaatgtcaatgccttaggtactaagctgtactgaacatgttaccctttgcatctttatttctttccacccattttctttttattttctttggtttatctgagtttatgcaaatatctctaaccttacctactattttgagaatagggcttgtgttttatctttgcatacttttaaactcaccagtgatgaccagtacattatacatcatagaactttgcgaactctctgttaataagaatgagcaagtaaataggttaaaagcaatttgggatttgcttttcttaaaagaaaacatgaaataaaaatgcaaatatccttatgagttaagataacttcttatgatactatagcaaacaccgtgctatgcctcctcaaaaatgtatatgcagtggtttagattgtatatttgggccacgttttactgagtacttgtacacatatgaatgtgttagctttcagttttctttttaaaactatagatattagttggcatacacaaactcagctacctgggtcataaagatattatagaaatgcaaatgttttccttggcagatttctaattttaagtattcctttttttacagacaaataaaaagaagtgttaagaattgcctttgggactctgaaggctgaaggtaatgtccagtggtattttcctgaatgggctttatcttcttgaattgtcttataatatttaaggtcttggatttgctacctcaacttttcttttattttattatttttcttttattgtccttaaacacattaaatatctttttctatgtatacctaaaaataatatgaaattgtaagttaaaaagtagaaattttatactctttctgaatatttcagcttaattaggtgttgctctaactcttgttccttctatttcattatgtattatgtccctctgtcctcctttttttttttttttttaactggtttggaactcatgattttaaactgtgttcttttgttaaacagacatattggcttaaagtcagaatgtcagtaacaatttctcctgaggaagagctttacaattaactataagaaataaaattgtatttgttggggacattgaaactcttcagatgagatttagtggctactgatagtcagaagtccagaatttcaggcaagaagtttacaatagactcgtgtggctgcattgtgtataaagagctcacagggattgaaggaggcttcttagacaagagggggctgtaattacttttcttcttacatgcatggttagattttccagtgagactaacatggtagggtaatttattatagaagagtaaatcacagattacattggagggggatggggtggtgcgatccaaccatcagttttgtgaatacatacacttaagcatgtgtgatagcttgtttttaatttctttacaccagtgcacacctcaaacattccgtttagcagtgggatatgcaaattgttccaaatgcagcagcagtactttcacctgaatgtcaaaactgtcagagaggtttaaatcaaatctttataacattttttaaaaaccagccagccccaagatcgaggcaccaaactcactgaaaaaaacttcattctcatacttccagaaagctcctgtatgtcaacagggtaatgtcaaagttctaattcacctgctttctaattttaaccttttaaggattttattttatttggcttaattacgatattttctacaaattaatgataaatgccttgattaataaaaccaaatgtcagagaaaatgacaacttgatgaaaaattaatactcggcaatattttaaggtacagaagtactaaagatgtactcttaaacctcatatttcattacctctttctgaaggtagttaacgagaattctctttgcacgtaagttttcacagccacatgtacagatacattttagcaatataattttcagtaatttctgctgttctttttattattagctattaaagttagaaatatacttctaatttttatccctgccttgccccataagattatttatttttattcacaaaatcaaggtaaagtatattttggagtggttatgagtttaagttaccatactaagaatcaagttagcaacctgtctgtgtgaatgtgtgtgtgtgtgtgtgtctgtgagagagacagagagaaattaaagaaacctcattgtgtaaaattaatgtttggtgattggttatctgctagacgatttatttggttatgaacatttcaggtttatatttaaaattatctgagagggagaaagaatatcgcttttcaaagtggaatagattttaacatgataatttccatttttgttaaatatgtttttttcctgagattacattaaaagacctgaagacaagtgaagagtggtaacttccttttttcttgtatactaataattttttggctagctcaaaaaaccaaataatatgaaatatgattatttttctacttttactggagatcatgaagttgaaagttaaaaatatcccgtgtatttttccatcttcacaaatatcaggatttcagaacatgaataaaatatttgattaaatcttatgcagaaatggtactatgcaggtaccaatggtacatgcaggattgtagtccatgttagttttttattttcatattttacagataaagctgccaaccaaatgagggaaggcacaatgacctcttgtgtgtttgttttgtttggttgttcagaataaaaagacccacaatatatactgtcaatgaaatggactcactttaatgatctgttcatgtaatgacatgatgttcatgcctatcaacaaaaatttttgccaactaatgttagaatctcctttttctgtaatataatgagaatttctaagtaggtattttaggcatattgctctgcatagtgagataaataaaggtaagtgttggtcaacattctataaccacagtgtatgccaatcccaagggaaaacattcttcagtgtagatttccagtaatatttaaaatttggagatggattgcattgaatctcccttagctggctctaggttttattgtttttgtgtctttcctggttccaggcatccagtctgtactggcaaagctgcttgatgaggaggggcctccaacattgctgccccaattgcttacatacctgccataaataatagctttgtccactagttaatcattgcattgtaactgtctctgttccatcttagctgatcactgcccagaggagtttaagttccattgtaatacaaagctcctattacctttctgtacctgcatttatgtgcctgtaaaaccatccattcttctcatacaccagttaaataagacatgtcccactttttttgacagtttctaaattacatatttaaaaatgtgtcttttcctccttgtttattctgttcatcctttcgtcagtttacttctgcatataaactagtgttttttcattagttacaagatttgattaaggaattattaacacctattttacaatccgcacttttatctattttttgttgagattttagttatttggggtaagtactataagaaaatgtcatcctttccctaacacgtctatggacaaaggagaaagactggaaccccccaaaatctctgagacctttgtctggtcttacatggtttgatcctaggaatgagggcactggcccaaccttacacagaatcttcagttttagggagttgagttatgattatttaaactcagtgcttgaattaacacacataacaatcagctgatacactttgaataatctgaatcttccgaaaaaataaacagcgttagaatatctctcatccaacaaaagaaaaaaagtaaatatgttttatggtaggcttaaaatatataaattcccagttttgatactcataattgtaccatatgttctctctaaatgacttggtagcacctttggaaattgcattatcttttttttttttttgacggagtctcgctctgttgcccaggctggagtgcagtggcatgatctgggctcactgcaagctccacctcccgggttcttgctattctcctgccttagcctcccaagtagctgggactacaggcgcccactaccatgcctggctaattttttgtatttttagtagacacgaggtttcaccgcgttagccaggatggtctcgatctgctgacctcgtgatctgcccgcctcggcctcccaaagtgctgggattacaggcgtgagccaccgcccccggctgcattatttcttttaagcctgtattttattctgctatctcaagtaattgattgtgaccttattggcttgaaaagattaatgcagcttccagagttgactaatgcataacttacgtaccagtagaatgataagtttttgaaaataggaatcatttaccttatttgctttctttggaaacctgtttattaattgaataaaatgttttcatgaaacacactaataaatgaagcaagcagaaagtattaagaagaagcacgaacattgtccaagatgtataggtgatttgtgtttcttgcctcaatgctgcattcatgctttctccctgtctaccattccctaaaatacccaggtctctttctgtatcctttagtgataataagatgttttttattcctctaatgaagtgggaagtaaattaacacagttctttttgggaattacattactcattgtagtaccactcaacatacctttgtaatactaacccgtacccacaactaattagtgaatttcagaattaaggaaaatcttagttgtgtggtagctgtatatttaccagtgatcaaggaagtgttactaatacactcgtcagtattaaaaaaagaattaagtacacaaagggccagctggttgagcccaggacctatcaagagcccagtatgtgtgggctggcccaacggaatgacaaaaacacttaccaggctaagtggaatcagatttaagctttcacttacaagaaagataatgcttttcaaatgtgttttcttatcatattgtgatttacatgtgcaagtctcatttgtactggtaacatttgagaccacatatttccctgtgtatcaagaactatgcatatttacatgtatcagaaaaatctcttggtacatgaagtattgggttcatagttcagcagttaccatgtaagcatttttgttggttcagagaatcctacttttctctcctacaaaaatctataattttactgttataacatacatattatactttcttataactgaatatttgtctcatccaatagattgcctggctcataatataaggtacctggttatagagtatttgccatagtaatggttagataaggaacgagtaaatatttgcttagtgtttataacactattataatagtagttacaataaggttaaattggagaaattaaaaagcaaattccttctctttcctgtgatttaactgactttaccagtatacgtatagaaatatcctgttcccaactatattttgtatccctttcatttttcatctgttttaatttattttattgtataattgtgtacttttggaagccattttaaatctttttggtttcaaggatcgatgtatcagtgaattgttggatgggtaaattgattaaatacagtgtacatttttagggatttttctctccacaattgcacaaataatactagaggagactagctaactcaatcctccctcctttcttctgtcaaccccttctttccattttctagcgaatatttatggaatgctagctctgtgccagaaactttgtagatgttatagataactgttgaacaaaagagacttagtctttatccttgttgagcttatagtctaacagggagatataataagcacataaataaatattagagacatagatatattaataaatgactattttgctaaccttctcaattctagcttgggttagggaattgagtctacggtggagaaaattatcttcaatgatctgccttcttaatggtggatgacttgtagattaaaaattgtggagaggccaaagtatttcagattatgttttaaggagcaggtggctttgagatgaagctaggtgtggtaatatttgcatccaagatgagtcgtaaacagttttgtaaacctggcttactttatatgatatagaagatctccatagacatttgaaaatctcagattggaatattataggaatttctagtatttttaaattataaaaatcatttcttttgatgattatttatcaatagcccagagttcattcgtgaattggggtatagtaatgatgaaaaaagaggaggtgaccgaagtgtgttttcttttttctcattgggtgtatatgtggagtatttttgtcttctgatcagatagttcattatgctcccttttggatgtgtgtactgtttggccttccaacctgcatgcttattcaaaggcattccaagtcattatgttggacttcagccttgttcagtaaaaggccatttcctccatcagctgtccacttggacatacattctttttactcgcaaaaatatttcatatgcattcagtttatattagatgcatttgtcaaattactcacaaataatcagttttttaaggttataatttgaggtatgacctctcaaactgtaaattataaggtttgacctttttggttcacagtttgacataacagccattaattacagtttttaaagaacattttatttcatttagaatttgtattttgaaaacagtttaagtattttctctctaagtttttggaataaatgtggaaatgtaaatgcatatgtatctatatataatatatacattcaaatatactaaatagattgcatatatacgcatgctatattcaaatgtgtttatgcatagtacattggtatacatatatacaaatatttttatataatagcttgtgagttaacactaagatcttcttttatacaactctagcatcaggatgagatcaactcttttttttttttttgagacagagtctcgctgtgtcacctaggttggagtgcaatggggtgatcttggctcactgcaacctccgcctcctgggttcaagcaattctcgtgcctcagcctcctgagtagctgggattataggtgcccgccaccacgcctggctaatttttgtatttttagtagagatggggtttcaccacattggccaggctggtcttgaactcctgacctcgggtgatccacccgcttcggcctcccaaagtgttgagattacaggcgtgagccactgcgaccagccgagatcaactttttaaatgtatttatcagggtgaaagagactttattaccatttgaatctaggctttccccccttttttttcccttgaggaggaatgcaaaagtatatgcctacaaaatgcccagtgtctgacagtaatttgaaagtcttgaagaccatttgaagtagcatggtgtgggagaatgtaaactgttcaagtagtttttgcaaatgtacactgaagatactgagatagaaagtacagtacataccagaaaggtcagtttaggtaaacacagaaagatatccagatgtgtgaacactttgctgatatcatcagtatttgaaatggaggaatttagtatgttttttattggataaaaataagatatttatatagctgaaaataacaccaagtataacgttttctgctgctatttaataaaatctattaatatttagatgatttcttcacttctgaacaggttttctcattttgtgctaaactgtgttctttgttgctaaattcacaaaattaaatctaaaatactatggagagatgaatacttaaaaacatctgaataattatcttcaagggtacacaaccacctctttgtattttaagtattttagaaatggttaacttggttttgttcaaattattctctaggttaaaactagcgtgatgtgtttcataacagaaagttaatttaggcaacagcactgaaagcaaagaactcttcaggaaggtgactcttttcttatagaatagatagtattatcctaaaatgtttcccatgaaaaatgttttcccagtatgtttgagtgtactttttaaagattttttaaaaaaatatttaactttatgtaaatattttcattttaatttcagaattatgttactaccttagttaactctagagctttgagtggcttgtttttaacagactgatgtaattttggagttctttattgataggtatatgtgaacttttgtttatttaacctgtatgttttgtacttcctatactggacataccattttattttccactggatttgagattcagtcttgactgaactattcactaacagttgggcaaattactttagttctctgggtttaagcctacacaccgataaaataaaatggaaaaaataacatctatctcttggggttataattaggattggagatattattaataaattgatgaattgaatacctagcacatagaaagtgttaaataactgatgattatttaaattggagaaatgttcaccatatttagaaaatattaaaacttttttaaacaatttccatctttctgataaatttgctacatttttcttcattcacctcgtgtgcttctttatttttttgcatgttctctgtttttatctacctaatttccccaagtttatctttgaacctggagttaccgtctcaccaatactatactggaagggaaagagattattccttaaaaggaaatcagtataccgttacaaagaagtaattgatgttccaaaaagaggcaagtatttgtcataggccatgtgtttagacatttctaaaatactataaaaacaggatctaagctgtagaaagtctttttctgattaggtagtttggatggcattcttttcttttaaaactcattagtttatggattttaaggaaatgtttgcctctttttttatttttctaaaagcaaacacttaacagtaaagacacaacctaaggaatggaagaatatgttttcaaaatgtacacctgataaggggttaatatccaaaatatataaggaactcaaacaactcaatagtaagaaaacaaataacccaactgaaaaataggcaaaggacctgaatagacgtatctcaaaagaagacatacaaatggttaatgggtatatgaaaaaatgctcaacatcactaatcatcggagaaatgcaaattaaaaccacagtgagtaccacctcacacctgtcagaatggatgttatcatgtgaccatcaatggaggaatagataataatatacataaacatgatgcaatgtaagtcatctttaaaaaagaaaatgctgttatttgtgacaacatggatagacctggaggatttttaagtgaaataagccaggtacagaaagacaaatgctgcatgatctcacttatatgtggaatctaaaaaagtcaagctcatagaaacggagagtataatgttggttaccagaggctgggatgagagactggggagctgctggtcaaggggtacaaaatttcacttagacaggaggaataagttgaagagatatgttgtacattgtgtaaataaaaatatactctatacttaaaaattgctatgagagtataccttaagtcttctcactacaaaaatatgtggagtaaggcatgcgttaaaaatagcatgttgtatatcataagtatatacaacttttagttgccaattaaaatttaaaaaacaaaaacaacatcatgatatattaactaagggagaattttcaaaaggcagaaaatttctgaaattaattataaacagatttttatatcacaaagtacatttaattatttgcagatttctcaggattccctggggtataaacctaacagcttctctttctactggcttccattaatatgttatcatcccatctttcagatagacatattttaggaatttttttccacatggcacaaattctttgatctaaatgcaagggcttccaaataacattatgggaggtttgaaatttgaaaatgtttttcaaagatcagtaggcttagaagaattcagtttaatttgaaggaatttattcagaccttatccttgtttagtagtgttatctctttaccttttcctatccctcatattacataaaagctaacacaagatgacattgaaaattcttaattcggtctcagtccactctttgagcccctaacttccaaactcccatatctcttcccatcaccccccgcctcctccacccaggcacatagttctttcaacacacacttcactgtttgctgtcttttaaatacactgtggatgccatgctttctgcctttgctcttactgttcatttagcctgctatagtctgcacatgacccagaaaaaacttgctatttcaccagcagaggccttatttatcctctacagatcaactgatcttttctgtgtcttcttaatgcatgagtatgatttaccatattgtagcatagtgttttttgggttttgtttgtttgtttgctttttgagacagactcgcactctgttgcccaggctggagtgcagtggcccaatcttggctcattgcaacttctgcctcccggattcaagcatttctcatgcctcaggttcccaagtagctggaattacaggcgtgctccaccacacctggctaatttttgtatttttggtagagacggggtttcaccatgttgaccaggctggttttgaactcccgacctcaggtgatccacccaccttggcctcccaaagtgctgagattacaggtgtaagcctctgcacccagcctattaaagtttttaactcatgcctggctcctttctagatggtaagcttcttgagagaagggagtatgtcatgttcatttttgtgcttagctcaaagtatttactcaataaatgtttactaaattgattagactatgaatggacttaaagaaactacatggtcagttgtatacataatttatccataacaaaaatataggaaaaaggggttctttaaaaatttgtttactaaatttccctcggcttactatctgatttccttgaggccaaggtgtttgttttgatgcttatttttatagtttcagtaaggaaacaaaagttttgtcttatacacagcaacaaagttgaatataattttaagacaaaagacattttcaaggcaaaaaaactacttgtcaaagtagttttcaattatagtacttggaatgaaaacattgaaagattaatacagaaagtcttagaagtgtttaatactccatagttttaaaatactcaccattgattattgtacttagtttgaaacattttttaatatgtatagacttaacctaggatcttgaatttaggcagcaattagccttttacatggacctgtttggaaagcattataaaataacagcaccttcccaaagaaagatgtggttgcggtaaaacttcactcatttgtttaataatgtttcaactgaaacaggtgccttacttgctttgttctccagaagcagctttatagatttaagcactgagtatacagtacacagtggcactattaacaaatcagaatgaggccaagggaaaattcatctaggatccacacacctaaatgcagttagtaaacagagacaccaactctcattaagcataattaaacctaatattgactgtaaactgttacttaccttaaacttctctatagagagtgtggaaagggattaacctagcagattgggacattaattactacctctttcacattagagttaccatcaagaagggctatattcataaataaaacataggagggattgagagactgaaaatatgtaaatttattttataaaaaggaatgaaaagtctaaattgaaaaaaaaaagtgagctgtgagtgatgccagcttcagcaaaatggagctctggctaattactacaaaaaaactaggcttaaataattatagaaatgtacccttgccttctgactgacagaacctgtttcacaagagactccagctcaactaagtacactatttttcatgcatagcttcctccactttcttaaactaatatggagtttaagagaggatgaagggacttgggagaaatacagtttttccctttttttctcagtcattaatagccttttatttatgaaattgattataatgactatataaatgttttttggtttgtcaacaagaaggcacagtgctgttttttgttcagtcaaaatggtccactaactggtctcctgctactatttaataatctccttcttgggtgcaatctaaaaggtatgttttgaaggatataaaaatgtcagctaaatttaagatcgactgttaagcttttatattatactgctgccccaagggggaataccaggatctaggagataagaatttaaagagaaaagcaaaataatgacaatacaaacttatctaccagccttagaatttccttcaaaatctatcgggctgtctgtctgcagtgagtgtagactgttatcttattacttgtttttatttcctttccagtaagggaccagatactcacatctgggtggggttacttattacttcaccagggtggggttctaatttttggaaccaaatcccatatacaattttgtgtatggttgttgtattaaaccacagtttaggtttaatatactaggctcttacctagattttagtgctatcatgctaaattctatctttcatgtgttcatgagcaccagaagaatatagcaactgtgcatgtggaaaagggagcttagaaagtaagcctggagcatgtattcatttttgtagtggaagtggagttcaattttaaaataaaacccctaatttttccctgaatttaatgctcatttcacaatttatgagactaacttatgcaacagcagtaattaatggacaaaaatctatccttcatttttcccgttgaacagaaatttgcaaactggttggatgacagaggatgaacgaaaacagtaagagtaagagtacttctatcctctgttcttgtaacaatcgtgacattatgaaataaccataacaatagcattcttattaatcagacatatttatacagaattagtgttggcttctgctctatattacctttagttttatatgaacttttattatctgtgcatatcaaaagagacatggtgaatgaacaaagaagccctgttatgagacaagtattatttgacattttgggaagctcttattatagggtttcctcttaggcaagaacaacgggaaggttgtcattagttgcactactacagatactctggatttttaaaaacagaaatggagcccacttttttccttgaagaagattcatcaattagaacaattagagtgatctgagacttccaaccgagacttgtcctcctaatgttcttgttttatcatgtgaaacaatgacctcataaggcatcttttaagataattgatttttccttggattacagagctagatagctgtatggtacccttatttttcaaagatgaataattatttttagacttctggaaaatctctgattaaaccaaaatgcagaagtcttgcaaggtctacaaccctactgcaaaccagatgccttttattttttgtattgaaggaggatagttctaagttcttttgagatccttttcctgggcttatgacatatttgactaggaattatggttaaaaaaaaaaaacgagtatggtgggtaatactgaatctcctcttaaaaccgctggacccacactttcagagattgaccagttatcatgtattttttttttttttacctgtagaaggacactcacatttcttcaaagaaatgtttctactctctatttccatttcttcaccaatccattcagcaattcaccttgtctgctgcagggacctccatcacttctccaaattaactctcactgggacctcactgagcatttgatcttgctgaccactccttccttattgcaatgctttcttcccttatttttcatggcgtcatgctttcttgattttcttcctatgctccttgtcatttcctcactatgtcctttgcaggcatttttttctgatatcctcactatgtcctttgcaggcatttttttctgatagctattaaatgttggatctccctaagactggatccaaagcacttctgatgatgtctagaattttgaatatctttgtaaccagaacacattgaaatgttttcagggaatgtattataattcttttaaggttcttgtttagggaccatattttaaaggccacatttatgtgaacagttttgtattctttatcactagtgaaatataatactcaacacatccccataggggagctcatgtggtactttttgttcaagtttgtaaacgttatgaaatcttcctgatgtctatatgttttaaccttgggcaattattaatcctctgtagctcagtttcttaatctgtagtacgtagggagtcatcccagctctttaggattccgtgatgctgtggtttgatattttactatttgaaaaggatagtgaaatataaatatgtgcagttgacactttgaattccacagtcaaaatttataaaagcattctctcatcatttccacttcacattttcttcctatatctaacatagttttgtgcttgtgaaaatatgtatttctaattccatgtttacccaaaatttatttgcacagttattgctatgaaactttctcaaaagccttttgaaaatctgaatagattatatattctagttactgcatttgcagatgcttctttaatgccacaagaagcctagatagagaggctcaattcaccaagtgggcaaaagcttttcgtgtatcttcctgttttatacatattcccactgtttgcctttggttacaaaggctgcttctaaaccccttttttgggggaatttggccacattgccaatctttcagtactttgtgaaaatggccattttaagaacaagttagtttttctgagcacagttttacttttgattggtacctatttgatgctagtgacttatctgcagctagctttttaattaagaaagacttttgtatttgccactgttttaaatctagactctctaaatttgtatgcttcaaaatatatttgaggcatgagagtctccaagtgtgtgtgtgtgtgtgtgtgtgtgtgtgtgtatgtatataaatatagatgtgtgtgtgtgtggtgtgtgtgtacatatatatcttttgtttttgacctagaacaactactgtttgaatttccttacttgttactagctgactgattctctttggcatacaaacaaaacaacaaaaaacaaaaaccgcatttggtgttggtgtcccttgcaaatttgtcatcatttttcttatttatttatttacttagttacttacctttccaaatatctaatgtcttttctttcttcctttggatattttttaactgtatactccagtgggcaatccacctggatttccccttagacattccactatgtgatctgccttctctcatatgagtgatcttttcattttaaaaatggtgttttctctcatgtttgttaattttgtcatttaaaagtaaaggaggatattcttcattccaattctcttttccctcatgtcaattttttttgtttattaacattttattgaggaaaatgtttgaagataagccttatacaacctgtgtggtattctgttttaaaaacactctttagtgtgtttgaggttagctgttcatctctaattgtcattagtgctcattaggggaagtgagaaatcacttcagtttttcttgggtttctggaaggaaagtagttgagacattcagagtatttgtgaattttaatttttggtcaccttaaaacttggttatatatagtttggtcccacactatccaggaataggaaaatttatgtgtgaaaatctaagtacagtgttatcacttctgggtaatttatgaattctagctatttctcctgaagtcttcaaaatgcctattattactttctttttctttctttttttttttttctgagacagactctcactctattggccaggctggagtgcagtggtgcaatctcggctcatggcaacttcttccgcttcctagtttcaagtgattctcctgcctcagcctcctgagtaactaggattacaggtgtgtgccaccaccctggctaattttttgtatttttagtagaaatggggtttcaccatgttggccaggctggtctcaaactccggacctcaagtgatctgctcgccttggcctcccaaagtgctgggattacagacatcagccactgcgcccagcccaaaatgcctattatttcaagctagggaaaggtaactaagatttttaaatccgtaagaaaaagactgtattctgctctgaataagaaaatctcacccactccagtgcaagtgttaattttgtgctccagtaggaagtcaccagctgatttttgtcttcattaaaaaatttttaaatgttgaactgttactagattttatggatgaggatagtagatggagcattatgaactgtttattactgtcacacaaagtaagttacaggaagtaagaaaaaatattacaaaataaattctttagacagtaatcatgatttctccttattggattttgcctggagaatagcagatccacaaaagagtaaataatcaacataaattgatagtgaaaattcctgaagtttttccctgaaaagggagcttgacaaagcaaatggctttacagctttaaggaaaatctcacttctgaaatgctgtgtattaataaacacagatatttgtgtagagacactcaaatggagatgagttcatttttagtacaatgtgtggggagtgacatgcatggaattccattaatagcaatgtatgttgtgttcttttcatttcattttgctaatgaatttagtattagattgatgggtgctaggaaaggaagacttaatttgcagaataagtagctggaacagtgtacacgtcccagataagagctatcaaagctgacctccattcatcctggaggacaaactctagatacaaaaggatacttagaaacacttgcttctcatcagatatgagttgagctagcaaccttttgtctatggattcatatttatctctagatggtgataactcctcctaggtagcatttaaaatgtgtggttgtcacgatgaaaaggaagcactactggaattcagtggataggggaaagatatgatgttaaatcctgccatgaatagctgaaattacttagaaaagagatttgcccagtcacaaagccaatagtgtttctgtagagaaatgctgttagggccataagatagatgttctttacggcagtggttttcatacattttcctaataatccacagagataaatgcatttaaatcatgacacagtctacatgcagtcatataattaaaacaaaatttcataagacagtatttacccttcctatgtgttgcattttccattctatcctctagtatctcatcccatcccatcctatcctactttatcttatcctattttatcttatcctaactttcctttaaagtctacagcccactatcttaatttcaagagcactgacagtgtgacctacagtttgagaaacactgttttagagctctttaaattttctggtgaagataggataaaagagaaaataactaaagagttgcctgcagtatgatttagtttccttataacctaagcagaacacaacattttcatgtgtaactattgtccaaattttgttttggaagaggtgtggacctgtatgccagcagtccaggcataaagcctaactgccacctttgccctctgttgccatgataatgagggaagggaaacagaaaactctagcccagctcactcacagaatttggatccaaaggctcaaagctgcctctatgttgctggaacagtgtacattgttgcgtattaggaaccatgtggcattatgtcagtatgaacaggttcactgagatgagagtgaaacactttgctcttcctgtcaaagtgagtcatccctaagctgttcgataatgatttggtatattaggcctctccgttacatgttgttgattgaggaaaatgcagagtcaaatagcctgcatgttttggtgtagtgcccaatttatcgtagttgtataaagttaaccaagattcttggatcctcaggatatttccagatatagcttgtcaaaatgtttgtaaatgcgtacttgctgatggcaagcctgccattataccttaattttcttcaggtcatccacctacttcaaactgaagtgattatacaaattaaatctaatctatgattcccagctgagggagggaaaggttatgttgaaaaaagcttccctagtgatttcagtatgtcttcctagttgaagattattattggcctatttccaggatgtctaccttgctgtcttaaagtctaagtcatcagaagacctgcagaacagggtttggtcacaaaggggtgaactgaatgtgggggattttccgctgtcatcttccttgtttgtgggttattgtcttgagtatttgtccacttgcttgactgaaaaggccaggttttaactttgtcccctgcttttgttgtgttgtcccagtgacaattggaaaataacctgagtagtgaattggaagtttattttgggggaacaagatcattcaattcagctcctgctcctatgagctgagtttgattagcatttttttgcatacttttgtcaatatagcatgtgtttatcttgtcgttagagaccttggtattattttcagtagtagaacatatttaatactaaatctttagcatgatatatgggtgtttcagatccatctattaattaaaaccatcactatttggcaccaaactttagatttaaacaattgttagacctagtatgtcacaaaatttgccttttccttttccattttcactaaaacctcctggttattttccacttatattgctctatctatgaaaagtggccatttctttaaaaacaaaacagaataaagtacaccccccacctccatttttttgtttgtttgtttgttggtttaaccttacccagaagaactgattccctagaaagccaaagtcagagaggtgatggagtggcagttgtttttccttttcctctttggagctatcatttctatttgaagatgatgacttaccatcatcttcccttacagtgagaaatatcttgcatggaagacatctctgtggatgatttcaaggttgagtactagagctaagatgatgagaacttggcccacttcagttgggcagtgtgaaaagaaacagtgtgatttttgtcagtctttagagagtggttgtcattaagtcagtaaagcaagatcagaagacctgcacaacagtgcagctaacaagtgaattcaattcaggggttaggaatgatgcaaacaatgtggagagaaaaagacaatttcgtatgtgctctgtaaacagaactcaggcaactgtgttttgtttatattgatcctcaaccacttagtgcatggatagatatatctgacttttagctagagtgttcaggtatacagcagaaggtgcagctatgctgtctctgtctactgccatttagtaacttgtccaagaatctctggagctggagttatcagaattctttcatatttataggaggtctaattgtgctggtttatcctgagttggtgaagggctcaaagcttgatctccaactttcagggcaccataggggcagtagtgcccttcacctcaggattcacctgctctttgtggggtagttgcatgggatgacacagaacttcaaagttctacttggcagacaagaagtttcctttagaattactattcaccactctgtgggcagataagctttgtcagcagcaatggcagctgcaagtgaagacacctttgtttacctttgttccttggtatcagcaagagaaacatggaatctacctagcttcataagatgttgttctagccagaactcaatgaagttttatgttcccctgatacttcccttggaagatgagtggcctctaacagtatttgcagttgagtgcactttaggtgccccaaaccttatcttagcttagaagaaaccagtgacaattcaactttcacttattctcagtgttctcattgaagcatgctggcactggccctgacacttaaactcacactgcttagtcgaatccttcttaaagtaaaaaacactttctcagataatgctatctaaggtaggactttcttactaatccataccatagtaccatgtttacttcctatttagcatattttgctatctgtaagagtgtgtgtgtatatgtgtgtgtgtgtaactaaaatagaaataagaaggacacattaaacttatttcagactcattacctgatttcttttaaggattaatatgtagtaaaaatctaaatatttttatagctacctacctaccaccttactgattttataagaaaatattggttttctgtttgttgaatcatttcacattattaaaagggccactttctgatttttgattattttcctaagcaagtaccacgtaccttttatataagattctaaagaattgataaatggggtttaaaaacaaatatttaaagcaaatattcagcttaactgaagtcaaaactatttggattacacaaatatttaaacaaagtaacaagcctgtttcataaaagtatgaaaactgcactttcacagtgagatcagcagaaattcatttctataaaactttcttttcagtttacatcttacaaagatttgacctcccccattctcagctttctgcctctgctgatatgacttatctctgaagaagtaaccattactcttacgaaaactgtagttggctatatcaaaaaaccttactcatgttaacctaaaaatttggtaaggaatataatctcttaaatgctgttaagtttctgaatgatcatatgctctctcttatgaagctaattttttcagttctgtttttactaattatatattagtctattactgagagaagggtgttgatatctccaaatataattgtagatttttccatttcacctttcagttctgtcagtttttatgtcttcatgtattttgaagctctgttgttagggcatacagatttagacttattatatattactggctaattaactcttcaacattatatgatgtcctttgtatcactggcaggtttcttcactttgagatctactgtgtccaatattaatatagccattccagctttattataattggagtttgcagcacatacacttttcttcaaacctacctttttcattatatttgaagtaaatttgttgaaaacagtgtataattgggtcattaaaaaaaatccgttctgataatctctgtctttaattggtatatttatgccatttacatttaatgtaattattgttacatttgaattaatgtctttcattttatattttgttttctgtttgtttcttctgttttcctttgtttttcattttctgttttgttttgggttatttgaacattttttagcattcaatttaaatttatctattgttcttctgacgatatttctttgtatagttgtttttagaggttgttctaaagttgttcaatatacatatctttttatactcttcttagaatcaatattttagacatttaaatagaatgtagaaatcttacaaccatataagtccttttactctcccagttttgcattattgttttgtcatatattatatctacatacattggaagccccgtcagataatgttgtaattttgcattaaattgtcaaacatgttttaaagaacccaaaagaataatcgtttcttatatttactcataggtttatcactttttttcctcttccttcattcctaatgttcagtgtttatatcagtggcaatgttgtatcatttgtcttctgtctggagagcttcctttcagcaaatgttttagagcaggtctcttttatacaggatatagaattctctgtgctctctcagacctttaaaaaaggggtgccatttccttcaggttttcatggtttctgatgagaattccacagtcatttgaatggtgtttccctacagataatgtgtgattttctctggatgctttcaagacagttttccctgtcttcaatttccagcagttctattttaatgtatccagagattgattttttttttttctgtttggggtttgctgtacttcttgactctgtgggtttatgtatttcacagaatttgagaattttctagccactattttgtcaaataccttttcagaattataatcttagtcaattttctgctgctataaaagaataccagaaattggataattaatacagaacagacatatttatttggctcacagttctaaaagctgagaagtctaagatcatgatgctagcatctaacaagggtgatctcatgatggaaggcatcatgtggcaagaaagcacatgacagagaggacactgggccaaactattctttttatcaacaactcactcctgtgataactaataaactcccacattaatgacattagtctatcttacttacctcttaaaggtcctgatactcaacactgttacaatggcaattaaatttccacatgagatttggagggggcattcaacacatagcacactctttcttctctgcttctgttaatataatgacatgaatgctagacttcttgttattgtcccacaggtttctgagccactttttttctttattgctcatattgcataatttcagttgatctatcttaaagtttattgactgttttctgtattatctttattttgttggaaaccatccagtgatattttgttgtatttttttaaaattttatttttgagttttaagcctgtttctcattgcttgtttcagcatttttagaatagtaaatttaaagtttttgtcaaacaattccaacatctgtgtcattttaggttttatctccattgattatgttttctcatatgagttcacatgttcctagttcttcttgtgcctggtgatttaggattatttcttagatattcttaatatcatgttatgagattctgagtcatattgaaattctatggagaatgttgacatttttgttttaaaaggcaattgacctggttaggttcaggttgtaagatacaagattccttctgtggtttcaatatcagttttgcttacggtgcttttcaggtctgtcctgtgtgtataccagtgaacaatcttggatgtagacattggtctatctgttaatttcattcttaattgtattcatatgctgattaacatcagatccatgcatgtacagctaaagatgagcccagaattttgtaaccctataagatcactttctgcagcccctttttctctgtgctctcattagtattttttagttttcctggagctcccctttatgtcctccagccagcaagctggggctttatttacctcatatgcacatttctgtgactatgcccatatttaaggctaagtagcaggaaaacagagaaaaaaaaacaaaagcaatggaaattcttatggtcgcaattgtttttaaagataatttttaaatgaaatattttagtgcaggaaaacagttacaaattcagaaattataaaaatataggtaagtgaattttcacaaagtgaacatattcatgtaagcagcaccagaccaataaaaaaacattagcagaccacaaagatccctttatctatctttccagtctctacttcctcaggataaccactatcatgacttctaatattagtttatttttgaaaaatatagaaatagaatcatgtgattatatattcttctgtatgtggcttcttgtgctcacattatgtttctgagattcatttatattatgttgcatttacatgtgcttgcagattttaaaactattttattgctttataatatttccatgtattaatataatcacaattctattattattattttcagctcttctactatagatggacatttggcttatttccagtttgaagccattatgaattgtggtggccacatgcatattctactacatgtcttgttttacatatttaagcattcttattggatatatgctgaggagtgatattgctggtgtgcttatgttcagctttagtagatagtgccaaataattttcaatgttattataccaatttacatgatcagtagcagcacagtaatgcccctcccacttgattcatgatttcagttttccacagtttcagttatccgtagtcagctgcagcccaaattttatcatctcatatcatcacaagaagggctcacccttaagtacaaaaagatgttttgagagggaaatagagagagaagaggagggagggagaccacattcatataaccagtatagtgctagaattgttctattttatgattaagtatgttgttaatctcatactgttcctaatttatacattaatgttaaataaattaaatcttaaataggtataaatacgttaaatcttaaataggtatttatgtataggaaaaaaacatagtatttgtaggattgggtactatttgcagtttcaggtattcactaagggaggtggagtgtattccccatggataaagggggactactgtataagagagatcctattgttctactcgtcgaaaacacttggtcttttttcattttagtttttcaggcatgtgtgacatggtagcccatgatatgatggctttggtttgcatttctctaatgattagtgaaattaagcgtcttttcatatgtttattttccacttgggtatcctcttttgtgatgtgcatgttgaaaggtattgtccattttccagttgggtttgtttctgtttttattattaagttactgggatttcattttatattctgatatatacttctttgtcagatatacttattacagatatctacttttattctgaagcttatgtttttactctcttataattgtcttttttttcttttttgagacagagtcttactctgtcgcccaggctggagtgcagtggtgcgatcttggctcactgaaaatttgcctcctgagttcaagcgattctcctgcctcagcttcccaagtagctgggattacaggcttatgccaccatgcccagttaatttttgtatttttagtagagatggggtttcaccatgttagccaggctggtctcaaactcccgacctcaggtgatctggccaccttggcctcccaaagtgctgggattacaggcatgagccgccgcgcctgaccttatagttgtcttttggttacaaaagttttttattttaatgcacttcaatgatcaatttcttcttttagtgttagtattttctatcctgtttaaaacaaaaacaaaaaaatggaaaagcttttgcctaccttaatgtcataaagacatttcctttgttatcttctagaatctttattgtttgccattaaaatgtaggtctgcattttacctgaaattcatttttttgtgttaggtgtgagatgggggcaaggatggacaggattcattttttctttttaaaaaattgatcaagtgccatttgtcaaaaatactttccctgagtatgttagcaataactttattataaatgtactgcctacatattcatggacatatttctggactcttattccaggaatctatttatttacccttgcatcaatgatgcatgactaaatagtgaacatttagaagaaatcttaatatctggtagtgtaaatcttttagctgtgctcatcttttagattcttttagttagtcttgttcctttttatttccataaaaatgttagaatctgcttgttaatctctacaatatgtaatttgctgggattttgattgagatggtattttgggaatactgatatctaatctataaatgcattataattcatacttattttattcttctttaatcagtaatattttatagttttctgcacagtggacttgcatactttttgttagattcatttctacaattagattttttaatgctcttgtaattggtatcattttaagttttattttctaaatgtgtattgttactatataagaaaacaattcatatctatctatctatctatctatgacacagagagagagagagagtcagaaagagagaggagagagagagattcaccttggccaggaatcttgctaaatttacttattaattctattagactttgtgggttcttttgaattttttataacacagtcatgttttctgtgaataactacagttttatttctaccttttcattccatataactttaatttataagtgtttttgacttgttgcactagctaggaccacttgtgtgcactagctaggaccactagtataacatttgttctaggtttggtttttgcttttttgaaaattgtaaatttcctgtatccactagagaatttctcttcaattcgtgagtttgctgagttggtgttgttgttttatgtgtgtttctgtgttgtctgttttgttttttttttaaatcataaggaatattcacatacatttctggatctattgagatcataggatttttgttatttaattaatttatttttgaatgttaatccacccttgcattcttagaataaaccctacttgatgttatattatccttttcatagagaatttgattttcttaatattttctttaagatatttctatttgcattcaaaagagagattagcttgtaattttaccttctcttaatgttcttgtcaggttttctttgcatagttatattattctcataaaatgagttcggatgtattccctctatttctacccttggaagagttgtatatgattggtgctatttttttttcattaaatttttgaaataatttacctgtgaaactatttgagtcagaaagttttgtggaaagacttttttattttatcttttatttgtgtaaaattatggtgtacaattgtaattttgttacatagatatattgcatagtggtgaattcagagctttcagtgtattcataacctgaataacacacatagtacccattaaataatttctcatatccacccccttcctcctcacccttcccagtctccattgtttatcattccaccctctatgtcaatgtgtacacattaggtagctcccacttataagtgagaacataggacatttgtctctgtttctgagttatttcacttacaatagtggcctccacttccattcttattgctgcaaaagatgtgattccattcttttttatagctggatagtatcctattacatatatatttcacatttttaatccaatcatccattgatggacatttaagttggctccatatctttgctattgtgactagagctgtgataaacatatgagtgtaagtatatttttggtataataatttctttttgggggtatatacccaatggtgggattgttgggttaaatagtagatctatttttggttctttgagaaatctccatattgttttctatagtgattgtagtaatttacattcccaccaacagtgtataagcgtttccttttctgcaattgcttgccaagatctgctgtttttggtctttttaagtaatagctgttctgagtagtctgagatgatctctcatcgtgattttaatttacatttctttgattagtgatgttgagcttttttttttatatgtttcttggccatttgtatgtcttcttttgaaaaatggctattcatgtcttttgcccacgttttgataggattatttgttttgtcgttgttatttagtttgagttccttgtaagttctagatgttagtcctctgtctgattgatagtttgtacatattttctcccattctgcaggtcatctgatcactcttgattatttctatttctgggcagaagctttttagtttaattaagtaccatttgtctgtttttgttttggtttcttgtgcttttggtgtcttattaatgaattctttctctagaccagtgtccagaagagttttccaaatcaaatattcatgtcttttaaaagacgtagtactatgaaggatttccatttcttcttgtgtccattttggtaatatgtgtttttcaggggatttatatgtttcatcaattttttcaagtttattgatgtaaacttgttcaccagatcttattatctttgtactatgtctgtagcatctgtaacaatactccattttttcattcctgttaaggttatttgtcctttttcatctttgaaatttgtgtttctagaagactactgcttatatttgtctttctttaccaaaagaccccgatttttgacttttatcaagtttatctattgctttatttgaaagtatttgatgtattttataatacttatttgttattaattttgagcttaattcaattacggtcagagaagatattctatatgatataaatactttgaaaatttattgaggcttgctatatgactcagtttaaggatacttttggtgcatgctctatgtgcacctgcaaatatgtgtactttgttgctattgggtgcaggattctgtacatataaattagatcaaatttgctaaatcttggtgttcaaaacttttatttatctaccaactttttaccaagttctatcatttactgagagaaatatgtcaaaattttctaacttgattgtgtatttgtttatttcaccttttagtttggtcaatttgtacattttaagcttatgttattggtttgtacaaatttggaactgtgatatcttcctagtagattaactagtattatttaatgctcttcttgtactatttcttttcattctacttagactgatattataatgtatagtgatattagccttcttttcgttggtgtttggtaaattttttttagcacttttcctttcacattttctgtatacttacttttaaggtatgtgtcctgcaaatagcatattattaatggtgatttttaattcaaagtctgacattgtatttcaatgcaactttttaaatttacattaactgcacttgctaatatttgttgatttaattctatcatcttactgtacttttctattttttctaccaattttatgtttcccatttcttctgtcttaactttttttattaatcaaccttgttatttcatttgcccctcttttaacttgctaattacgtatttttaatttttcttagtggttaccctaatgagctctactgtaacttacaccttttatctcttttcaatgaataattatatttgtccctctctcattttttgtcttatcattgtcctgaattataattcttcaagtgctctaattcctaaaacattatttttattatttttctatacttatacgcatactaatcttgtctgtgtactttattttttgcatttctctatcattgtctgagatgcttttccttttacttgaaagatacctattagtattctttatagtatgaatctttcggtgaaatatttccgcagttttgtttttctgaaaatattcttagtttgactttttaaaagaatactttcattggttagagaattctacgttggtatttacttttttgtgtatatatatgttttgctttatttttattttacttttgattgacaattatatatatttatgagatacagtgtgatgttcagtatatgtttacattgtagaattaataaatcaagctaattagcatccatcacctcaaataattatcgtgtttttatggtaagaacatttaaagtatactttcagcagtttcaaaatatataatacactcttataaattatagtgatcatgctgtgcagtatatctctaaaacttattcctcttgtctagctgaaactttgtgctttttgaataacatctcccctttcttcatcaccatccaacactcagcctctagtaaccaccattttactccctgtatctatggcctttttggatttcacacttaagtgagatcatgcagtatttgtctttctgtgtctgccttatttcacataacatagtatcttccaggtccacgtatgttgttgtaaatgacaggatttctttattttctaaggctgaatattattctgttgtgtgtatttaacacattttctttatctgtttttatgctgatgccacttaggttgcttccgtatcttagctatcgtgaataatgctacgatgaatgtgggagagcagatatctcttcaacatactaacgtcagttcctcaggatatatatcctgaagtcaaattactggatcatatggtagttatatttgtagtttttgaagaatcttcatattgtttttcataatggctgtacccaatttgcattcctaccaacagtgtatgagagtttcattttctccaaattcttgccaacccttactgtcttttaactttttgaaggtagcctttctaacaggtgtgaggtgatctcattgtggttctaatttgcttttccttaatgattagtaacgttgagcattttttcatatatctgttgaccatttttatgtcttcttctgagaaatgtgtgttcagatcttttactcattttttaatcaggttatttagttttttgctgttgtttgggtttcttaggttggtagttactttttaaaagcattttaaagatatcatggctttgttctctggcttcaattgtttttcatgagcaatcagttatcagacttactaatccttacaaagtaatgcatttttatttttctggctattttgagattgcctttttgattattgtttatttttaaatagttttacaaacaggctttttttttttttttgtagttggtttctttgtgtttatcctgcttggggttcttagacattcttgaatttgtggcttgatgcttttgccaattttggaaaattcttggccattattgctttgaattttgcttctgcctattctccttaccctttccttctgggactagagatatttgtatgttaaaacattttttaaccatgttctatatatctctaatgcttcttcttttattatcatccttatttctctctttgttttattctggatattttctattaacctattttcaagttcacaacttggatcttctgttgtgtctaactggctgcgattgagttattaattttgttttatttttagttctagaataatctttgggtttttaatataaatcccagttctctgattattctcactcttttcctttacctctgaaaccatatttatcactgtttttaaaagactatatctgataattctttaatctgtatcatttttgaatttatgtttttgtctattattttttctctttgttttggttctttgattctacttcctagcatgcttgatgattttttcatattaaaaatttagagtgttttgtatggtattatatttttccatggggatttaattttctcctcacagattattagaataaaggtaatttacttaatcttatcagggattaagacaatttgaagttgggtttccatctttgtgatggctactctagttatggttttcccttagttttataaatagtcatttagaggttcaaataaaattttggagtgcttttcaagtagtcactaaactccagtttttgcttcgttggtataagactactgaatattctttttaatgtcctagtatttaggttgctgttttctgcttgtttctcttttgattttctcactccaagaaagaggaactggaaatgttttaggggttaaaagtggaaaaagaatacaggcctcacctcattgcatttacagtttatccaggatcttgattcttcatgtcttggctgtgctgacagctccaaagtgttatttgtgccctcctctctttacaagacttcttaatgttctaatctggagctttgtgctcagtctcgcattctgttctacttaggaaacagcaaatgccttgaatttgaaaagtaataaacaacatagggcttactttaacgtgtttacttcctttatagactattgagttttaaattgaaattactttggttggtgcctggtgccttcaaacagtttttaaaataatttcattttattcatctttaatagtttttctcaacgagggggtgatttgatataagctactctatcacagtagaactggagttcttcttatgatgctaatttgattgacatgatatttgagggagggtggtagttgagcactatgtttctttacaaagtaacttctgcagacatacctccttttccatatgtgttttatactcccctctatatgaatttcttacaaatatttgaatgtatatattattctttaagtatttaagagtacaaaaagtttatttgccttgtataaattgattaatctttatttgaatgcttatagtaatttctctagccaaaactatactgttctgatattgaaaaatcaccaaaaataacattatttataaaagacagttggttatccctgatacaaaggaaattttgtaatttacgtgattacatgcattctgagaatccaaataatactgatagactaggaggctataacgaaattatttattaaactgtgactaatgcttaactgtgtcataatggtgctaggttcctttcacaaggggtaaaggaatttataaggggaagtcagtattatttaaaaactctgatttatgtatatcttgtgatagtagtgaataactaggcatagacagtacttttgtacatggggtataaacagttttcaaagttattttgatttgttaatttttttcctgaaatattgtcacctccctgggtaatgtgataaaccatgtgtaatgtaatatttggttagtaaaacaagcatcagcagataaatatcagtgtttgtcttaggagatgcaatactggaaacctggataaaacgaaacagttttaataaaacttgaacagtgtggacctgggtaaacacacctatttggacaacgtagagattgatttattgttactaacaatctattatattttacattggtggtagtatcaaaagttaaacactttctgaaacaacaaatgaaaaataaagaaaactaccaatttattattccagaagctatagagtctttagatatcttttgacttacattcacttttgccctgctcatcagagacatatctttttttctaacatctcaattgtttattacatgcccgcttaccaggtgtctgttatggttggtgaaaatttacggtcctaagtgtgttttaacagaatttaggaaaacattgcaaatcatgaattctattgatttgaaagcattttaaaaacctgaagtaggagtctagctccagttaaatgttattgttgggtcagtctcttctttgtactctaattttctctttcacaaaatgggacttgtaaaacatttatgttagtttctcaaagtcattataagaactaaatgaagagtagtatgtgaaaatcttttcccaaggtaaaaactgttatgtaaaggtagcagattattattgttatccccatcattattagtgctgattagcagatgactttagccctgcacagatgcatgaaacagttttgatgaaacttttctctagttttccaggtgataaatatgaggtatgccctcctgtctgtaacttactgacatcctttgtatttttatttttgttattttatttctttttaaaaatgacaccaaattcgctctgtggattttaggagatcaatctggtaacgggcttggattaattccttcatcagtaacaatgagttataaattcagtgaatttaacaaaccgggaaaggattccatcttattaagaataggcaacctaaggtccctgaatgcatttctttcattgttgagtagaggagcaataggctcctttggaacaaacttactgaattataaagaggaaatggtttatccttgaaccattatgaaattcaggcaatggatgatatttacccaaggccaatattgtaacataaaccgaaaatactaactcctttaaagcaatgtgcattattttaattcatgtaatcattaaattaattacttacagatcacagatcatttattgatggattttaaaggaaaagaaatatgcataagctgaataagaagattaagaagataggtatgcattatatcagaatgtccttcaaatagacctggaaaacacgtttgtctaattagggtgcatgacagcaatctatgaaactagttcttttaagtaaatagaggtctaccctgagagggtttggcaaactatagtaggaatgggatactttccaaaaaaaaaaaatcagaaatgaatgaataattcctcctttcttagtttatatgaattaatcaaattgcaattacattgtcacttatgtgcatagtgaagagagtctgaaaaggcaatgaaatgcactgtatttaatggacaggtatctttaggacatgggacatatgggcttaaattatgcactttctataaacaattctagaatagagggccaaaacataccctttctcattttacactgtgacctttgatttgcttgcacagtacctggcatatggtgactctcaaactgtttaatcacatgttgaaaaatgaatgcactagtgaacacatacttacatacacagaagatactccttacaatgatggtgaaacacctatactgaatagtcatagaagagcatatgaaacatcagttttcatttaaaaacccaatgctacaattaaaataaaaacattcccttttcctttcccatctttggctttgttcaatgttatgttggagccatgaagctgttttccagaatttgtttttagagactgggtcttggtgtgtcacccagcctggagtgcagcggcacaataatcactcactacagccttgaactctgggctcatcgagtaatcctcctggctgggcctcccaaagtgctggtattgtaggagtgagccaccacacctagtcccagaattattaagacagtattcttcagatatttttattgtcttctttgttttctcttctatagcttcatatttcccctgcttacttcgactctaaatcattttaactattttgcttttttgcctttttattttgaatgcttccttccctcagctaaaggtcataaattttaataaagaaaatttggaaaattcaaaaatgcaaaaaaacttcctattactaccatattggtttattttctgccagtcttaaaatatgtatcttttcaaagcttttaattttaaaagttataccatattttatctctattttcaattttacttaaaatataagttttccattgtaatagccacagcatttttggtaaagtagacatactatagctgcttaatcaatccttatgcttggacatttaaattgtttctatcctttcaattattttttaaaagactgcgatgagcatctttgttcataaagctctttatcattattattttggtatttagattgcttccttgagatagattcctagaacgggaataaaatcatatgtatacaagtgtctttctcagctctgttttcaagaggagcttttgtagagagcatagataattgacagcctccagctgctatacctgtggatccaccacaacattcaccctgaaaccatccttctttggggctgcttccaccgagtgactgaacatgtcaggaataccagaacggggacatttctgcccaatactagattcttctaatgggtaactctggttcagggactccctaccaacatggctgagactttcttttttgtatggtttaaggaataatgagaaggaaaaaactctgtacatgttcagtacagatgcaacttctttttctagaattttttttttattatacttttaagttctgggatatgtgtgcagaatttgcaggtttgttacataggtatacatgtgccatggtggtttgctgcacccatcaacctgtcatctacattaggtatttctcctaatgctatccctcccctacttccccaccacccgacaggccccaatgtgtgatgttcccctccctgtgtccatgtgttctcattgttcagctcccacttatgagtgcgaacatgcggtgtttggttttctgttcctgtgttagttcactgagaatgatggtttccagcttcatccatgtccctgcaaaggagatgaactcatcctttttatggctgcatagtattccatggtgtatatgtggcacattttctttatccagtctatcattgatgggcattaaagacttagacgtaagacctaaaaccataaaaaccctagaagaaaacctaggtgataccattcaggacataggcatgggcaaagacttcatgactaaaacaccaaaagcaatggcaacaaaagccaaaatgacaaatgggatctaattaaactaaagagtttctgcacagcaaaagaaattatcatcagagtgaacaggcgacttacagaatgggagaaaatttttgccatctatccatctgacaaagggctaatatccagaatctataaggaacttaaatattttattttatttttattttttttgagatggagtctcactctgttgcccaggctggagtgtagtggcacgttctcggctcactgcaagctccgcctcctgggttcacgccattctcctgcctccacgccattctcctgcctcagcctcccaagtagtcccagactacaggcgcccaccaccacggccggccaatttttttgtgtttttagtagacatggggcttcaccgtgttagccaggctggtcttgatctcctgaccttgtgatccacccgcctcagcctcccaaagttctgggattacaggcgtgagccaccgtgcccggccaggaacttaaacaaatttacaagaagaaaacaaacaaccctatcaaaacgtggctgaaggatatgaacagacactgctcaaaggaagacatttacggctggccgcagtggctcactcctgtaattccagcactttgggaggccaacgcaggctgatcacgaggtcaggaggtccagaccatcctggctaacatggtgaaactctgtctctaataaaaatacaaaaaattaacaggatgtggtaggatgcgcctgtagtcccagctacttgggaagctgagggaggagaatcacttgaacgcgggagccggaggttgcagtgagccgagattgcgccccggcactccagcatgggcaacagagcgagactccatctaaaaaaaaaaaagaagaagaagaagaagacatttatgtcaccaacaaacatatgaaaaaaagctcgtcatcactggttattagagaaatgcaaaccaaaaccacagtgagaaaccatctcaagccagttagaatggcgaccattaaaaagtcagaaaacaacagatgctggagaggatgtggagaaataagaacgcttttacactgttagtgggagtgtaaattagttcaaccattgtagaagacagtgtggcgattcctcaaggatctagaaccagaactaccatttgacccagcaatcccattactggctatatacccaaaggattataaatccttctgctataaagacacatgcacacatacgtttattgcagcgctattcacaataacaaagacttggaaccaaccctggctgagactttctcaggactttcctgcatgcagatctcttcctaccaaatgcttccttgcctttctcctttcagagatgtcagaattgcatcatagtctgagtgctctccttacctacacctcttcccctttatcatgtatagattctaccccaaataattatctcacatacccaattcaccttggcacaagaggacccaaactggcacagtacataatcatgattcaggcccttgatacatagtgcttaatggtactaatgtacactcccactgcagtgcctcttccaacactgaatttttcttttattgactttaactgatctgataggtgaaagactagtatctcacttttaaaatttctattaccttcatcactagtgagattgcacatgctttgttttccatttatatctattaaaatttgttttactaatttatccattcattaaaaaactttacttataattaatagttataattataatacttctttttgtggcatttttgaccgtgtatttgaatgagggtctcattcaatacttatctaccagtgtttggagtaaagtatgtatgtggaacaaatgtaatgattactcatttactcaggctaaactaaaaccctggatggtatttatgatttgccagcagcagtagtggcagaatccacatctcctgactctcaggaaagacagacagttttaacatttctgtaattatattgcatacgtgtgtgtgcgcatgcatgtgtgcgtgcatgcatgtgtgcatgcatcagtgtgtgtatgagtttgcagtgtttttccaatgagaggtgaagcttaaaattccttaagttgtattttattaatttcttttaacaatcttgttttttttcttctgtatttcctccactattgtgtttcctccactattgtttttccacctttatttccaaggtgtcctgatcatctgattcctatcaggtatttaaattatgcaggtgccagtctctgtgtccccaaacacacatagctaatcaagaataaagccatttattgtaaatttacctctagaatgagcccccctttctctgattttgaggatggatagatgctcattatgatctggtaggcaattataacatgcacatttagagtgtagaagagtactctgtgttaggtgttaagacttttattttactcatttaaagacaaagatttaaatgtgcttgtttaaattcaacaagcccttagagccatgaggccttgggggtaagaggtgcttaaaaccaaatagcacaggagctgaagaagtaattatatgccagattgaagatggagctgaacaaagactgagctgatctgggaacaggggatggcaaactgaattatgtcccaggtatccacaggccgagaaagcagactggaaaacatgcttcttcatacattttaccaaagtttacaaaatgcagtaattttcagatggtttactaatcttatttacccttcttttctgcatttttgctttaacctaattttttttaaaaaagaaaatcttaattggaaggatgttttgagtcaagaatacgacacttcataatgtaacatatattctggattcaaggtggcaggtaataaaaaataattggagtggaatttcaatgtctttatttccctgaagaccagccttgaagagcttcctcaagtgtgtctcctcttcctaaaggtaacatggtggggaagggagaaggtaggaattactctgacaagattttagttgttctaaatcagtgtgattaattttatcttaaagacttaaaatgtcccatattccctagttgccaagaacatggtagggaggaggcaaagtacacattctttgtttcaaagtattttgcagacagtctggtctattaagaacaaattctaggactaggtagtagggcttagaagttaccatgacccaaattgattttttcatttctcttaaagttgatggttcattttttgatgaaagtagcaatcatatctataaaaaccaattttgataggcctatcaaatctgaccataaaacagaaagctattttacattctacaaacatattattaaataagctcactgtgagtatacaagtactgtatgcatttttacttatgaaaatctttttaaaactgaagaaattttgaaacttttgtgatgataattaacaattatatgttaaaagccagtatggaagcctattttgtcataacattataacaaggcaacaagttttaactgaacaatggattcctgagcttctaagcaaatgcattttgacgtgttatttttcactatatgcaaatttagaagagactcagtttatcatgacctgtatgatacctcttagaatgttaaaaagaaaaaaaaagatagaaagaggaagggccacagtacacataaatcttgcctgcagcttccactaaagttactctggaaagtaacttaaggaaaagagatgattaattaatttatttaaatttggtgctatttgttaatccacagctatgttctaggcacagatactatggttcaaaaatatataaggcaaatacctgatttggaggagcttattttcagtgggaggtaaaggaggaggaaaaggatatcagaaaaaggaatgagcgatttcagaaaagagcaaagtgctgtggcagaggtaagcatagatttgaggaatcgtgggcagcaaagtaaagaaggctttcctgaagaggtcgcaggtaagtggaggtctaaaagatgaagaggactctgccagggcagagtctagaaatggggaaagttggggaaggtacattttaggcagtaggaacaatgcttggtgcaaagatccataggtgtagggtttcaacagatctataactcgatgagattcatgcattagggacctaagagagacagaaaagggcaagtacataatgggttcttgtattctaaggtggggtattccagagatggagaggtgctggattaatgctgcatttaccttgaccctttcctgtggtattagtagggaaggaaggaaggatgattctgaatgcagtgcaatggaggtagcaaaaaattgatctgatgacctttattttctcattgggatagagagcatattgctttgctgataccgaagggggaggggtaggtggaatagaagatttaataaaagtgggaagttttgaaatagatgtaaaatatactaaagtaaacagatgattagggaaacttggaaggattattaagtaacatttgggacccagctaagtttgggagctgtagatgtgtagtggttataatctgtgagtgtatgtgacccactttagctgttgcagttctaggagtggagaaagcagatagctggactgctctaggcctgggttttcacctatgttgacgctcttcctgtttccttccaccactcacctcttgtcacagaagactgcttattcctgatactgtgactgtctgcctgaaggcattttttgtgtgtggctgctgagcagatttggctcacagtgttgggcaggcttaaagtaccaaatagttactgtcactagaaaaagacttaagcaaataactgttagcaagtgggtggattacactatcatccttacccttcacatgggataactgtgaggcatgttctttactgttttccagagtatcccagaaggactaaactcatttcccatagcagtaacttgtttaataattgtacccttttttggctttgtccctgtttcatttatggctgtgtaacaaactacccccaaatacagggacttaaaacaacaaagatttgttattttttacaaatctttggggtgcccaggcttagattagtaatagcttgggtcactcatgtagttgcacttgactggaagcctgtctgggtcaggaatgactatgatggctttacttatgggttttaggcctcagtgcaatgtatagaatggctggggtctgtctgggcctgtctctccccattgcttctcatcattcactaatctagtctgagcgtctttacatggtatctgcatctaaggaaagcaaaagaagaggctgccaggactcttgcagccttggcttagaactagcatagcatcacttctgctgcaatctattgttcaaaaaaagggtgcaaggtcagtgcagattcaagagtgggggaaacaaactctgcctcttgatgggaagagcagcatgctagagcaaggctttgaggaactattgatggttatctttgcaaacattctatcttatttcccttttctgccttccatcctttctcccttaccagtgtttcatggggttgtttccaaaataaattatttgtactaaaattctcatcttagatctgtactaagacagcttggtaagtgagataggaaaaccaagaagtgaactgaaagtatttctaagaaaatagagtgatgacttatgtatgggctctgtgctgggtgacaaagacaatgtaaaagaaattgcaagagcagaaagctagagaggcctagggattgataatatctgtgatgtcaaacaattgtatatgataagtttggcagggtgagaaggctggtaggaaaggagactatgattctaggtccagcagtggcagaatgtaccttgggagactccaagaagcagaaaccatggatcaaagacaagattttgttgatcagcctgtggacaggctactgctatcaccttagtgaggctcaccatttttgaaataaattctgtggattggatattaggcaaacactccttcagcttgctgtacaggttacaggtggttacaggtgatccataaccctacatctgaagaggaggtggccattaacacaatcagtgcaaaggccctggcaaagtcaagttgcccagaaacagcttcagcagaatttcctgcctaccagatctttattcctaaaaaaattatacttttaaaatctaggacttcaacaaaaataggatgtctaggaatgaagaaaagcttcagagtcagattgcaatcaagttgtgctaccagttaggtgacgtgtggcatcacaaaagcataaggattttcgaacctcacttcttttttgtattatatggtgttaatacccatttgatttaatttaaagtttttgtattatttaagactttcaatgggtgcttgcagttggttgacatttttgaaaaaatcaagttgtaaacttttattacaaattaaaagtgaagtgcttaaaaatctcaacttgacatatgaaccaatttaaaagcttttaaaggcatgttgagaaaaaccaaactaaaaaaaaaacacacaaaaacaacaacaataaaaacctttgttattaccaaaaagacatgtctgtaggtaaaaataattttaaaaaccccatgcttcgtagataatgcaggtagttctggtttctgatcaatgggcaaaaagcaagcacttaaggtcttcagcatttctttcctgcatttctcattgctgtaatttcatattcatttcttcttgttggatgattaaactggatgatggtggagatggtaaaccggcatttactcaaccttcttctgcctcgggtgcagaattcttgactggtggactggctgctgttgtctctttgccatgttgtggtttagggttttctgggagtctacatagataattggggttttagcagcaccgatgttgaggtcgctgctgatattgggtctcatcttgattttctttactctcttcactgccgtcctctctaggctggctttggcgatgaggttccctgaggaatcgtggtctataaaccatacaaatatcctgcctcactggcctaccttgtgctcctgcaccccagttgttagcaccctccgtcgctgctccctgcaaggagggttagaatatggtggtcaatttccgtagggtctctgcctgtagtaaggcaggaaccttcgcctgcagcagggccggcattgttgggccgagcctaagggagcactctcccgtccttcgttcttttctccactctcactattctggtaattctactggtaattgcctgaggaccacatggatagcgtcaatgatggttaaggtcagctgcatacttactgctatcaactggactctacaggggcctgtaacatttactgcctccccacccttttctgctgcaacatcatcaaactccacagtctctccgtgtcctacactgctaaggtacttcctggggttactcttctgtatggtattctgctgtacaactgcatcttccttggtgccattcgcatagatgaaaccatttatttcttacattgaaccattttactgttcccaaaatcttccttgcggtgatcttatccccatcagcaggcgccgcctgtgaggtcgcccttgccactgctccctgcgccgctgcaggtggtgccggcttggggttggctgccttggcgtctttgctcagggttgtggttgctgtgatggtgacctgctggctgcagggttgtggctccttctggggtgactgtaactaggccgggggcggtggtggggctgctcagggctctctgggttccgctcgccgctcctgctaccgattgaactcaagtttcaattaaataataaaacattgtctaagtgcctagcacaaaataggatataagggaatattatttcccttttttcatttttttctcctttataaagtaagatttataaacaagatataaggtacctcgtctttctgctgttgtagcttgtttctgaagaagcgcagcacatgtttttcagtgtaccgtgccctggtgacctaaagttcgctccgtttcccttagctcttactcactacttagtagtcacttagtagtgattgcccaatcttaggcaatgtggtgttttgtttgttgtttgtttgtttgtttgtttaaatggaaggcaggatttatttgtgcttggaaggtatttggcattcatatggattttggcaagaaacgagcttcatctgaactctgttgtactcttattcattttgttaaaactgatattcaaatgattagagttatattcaagtaagaataagggaaacttctactatataatttatgtttgtagaattttgtgaatcgtaaattaaacttggaagctcttggctaaagaatttgtcttttcatttcaaaggaaggagttaaaatacttattcttgttattagcctgatgatagattaattcacttatattgccttttcaaaacaaaatgaagaccagtgacacccaattccaaacatttcacaattaaataaaacgatttagaaagcatgcaactcagtttgcacatatgaactatgtaagtacctctttatgtgatagaagttgtaagtaggaactggaatgtaattttgtccttatcttcaggtttaatttagcctgccagaatctgtagactggtagaaattattacattttatagtaatttccttttatattgacatgatcatgagatgggaaactagaagaaattcagaattccttcatctatagttaagctcttgctgtgttgtcatcttggaattcccttcttcccacagcagaatactcacttcctttctctcctttctcacctcccccagttgcacagaatcacccttgggtcctggccttctgcccagtagttggaccctattttccaggtaggaacatattgaccttcaaccgactgctagttttctaggtccacctctctgcttctgttttttcaggctctcttaaccatgtagtagtcttttcttccctggatagcactgatgcactgcatactgtgtagttggccacctcctgcagtgtgattcgaaatagcttagtgccctgcagggagcaaggcctgaggcacaggactttctgtgtccctctatcatagtacttacctcttcctgcaatgcattatattatttatgtatatatgccttttagtatgtatttattctggcatattataaactcactaaagcagatacaaaattcttttctatgagtgtgtgtctcacagaggacagtacaccttgtaccaactaagtgcttaataaatgtttatctgagtgaatgtaattccagcaagttggaaagagcattgtattgtttatcctggtttttgtttatttctttgtttctaagtggaagtttttataagaagatagatctaaagttctcagaatcctaaacagtattgcagcatctttttcttgaaatttacagcacatttctcattgcttaattctcaaatttgaaattacttttaacctaccattcacaaaattatctcactcacctgaagtacagatgtaaacaagcttcttaactctgtaggtaagacaacatcagatgtcagttgatgatttgcttgagattgtgtgtgggagtctacatttttaatttttttgcacttgcgtgaaaggcataatgtatctctcctgaaatattttctttgggcctgagatctgaggaatttgccaaatttattttttagaaattaaacaagaatctttccatcattgaagaaccttgaggttctccatcattgaagaaccttgaggttctccatcattgaagaaccttgaggttctccatcattgaagaaccttgaggttctccatcattgaagaaccttgaggttctccatcattgaagaaccttgaggttctccatcattgaagaaccttgaggctgccctcagtgactgcagccttcgacttagaaacggctaagcctgaaatgatggggtgtgccccggatgcctcagacgacagataaagctactccagccaggaagacacagaagtggaagacggagataaaactgcatgaaacgaagggataaagttatgtagttatagaattttacacctggaaagcagaaaccatatgttctagcctcacatttcacatgagtaaactgaagcctagataggtgaagggacctgtccaaagtctcatagtagcttaatggtggaaccatactttttgagagttaattgagggtgtttttcactataacctaatagtgttacatccaggggtatatcaaaggagaaaacagtttaatgaaattatttaaaatgataattttcttacagagattatattcttactgagttttaaataagagttttttccttgctgtttgaagttaccatgtcctataatgcatcaagtctgaaaatgcatttataaaatagagaggtatggactatatttttatctataaggtgaatgtgctttagcttcaggtttttttaaattttacacttggatgtgtgcttatttttaatttagaaaatataatttggttggaaacttaattattgccagttcttgagagagttcttcaatctttgagatgtggtatgcattagtgtaaatcttggcataactgtggacataaattcttcaattgttttttccttctttggttctgggatctgatgaagagtgttggttttgaaacttttgaggccaggtatggtggctcatgcctgttgtgaaactaaaaaatctgagacaggtctcagtcaatttaggaagtttattttgtcaacgttaaggacacatgcccatgacacagtctcaggaggttttgataacatgtgcccaagacagtcggagcataacttggttttatacattttagggaggcatgagacatcaatcaacatatgtaagatgaacattggttcggttcgtaagggcaggacaacttgaagcaaaagcaggacaactcaaagtgggagggggcttccaggccattggtagattagaaacaaatggttgcattcttgagtttctgattagccttgacaaagaggcaatgagatatgcatttatcttagtgagcagagggatgactttgaatagaatgggaagcaggtttgccctaagcagtccccagcttgacttttccctttagcttagtgattttgggccccaagatttattttcctttcacactataatcccagcactttgggaggccaagcagggaggattgattgagcccccagaagttcaagaccagtctgggcaacatagtgagaccgtatgtctacaaaaaataaaatagaaaattagccagatgtggtggtgtatgcctgtagtcccagctactcaggaggatagtgtttgaaatttcagtgagctatgatcacgtcactgcattccagcctgggtgacaaagcctgggtgacagattgattgttagacaatatgaactattgactaacattttttctgcttccaaaacttttgggtatttgttatatataaattttacttgcattcttacctatttgatggcatatatttctgtaaatgtacttattacctactttattgcctcttcatctgcctttgttcagccctctcctagaagcaggagacatttttctagttttttgtttgtttgttttttattcaatttttatttgtatctcttggtacttttttaaagccttctgttttctgtttctctgtaaccttctgttctcaggattagtaataatacaagagttttgcttcttgtgtggagaaataaacttccaaaaaaacaaccagcctgcagatagtagctataaactctggacaaaaaccaaaaataaaagcaaagcataacaaaacacaatacaactctgtaaaggttttggagaatggataagactagagaaatattagaggaggttcaaactttgtattaagcaaatgtcatgagatgaagtgagtttcacatttctgaggctttttctgagggcatctccaattgcagtggcaacatgggacaatttaactccaagagaaagcccttgctttctctgtaggctgtaggaactctgggaaggaacggggatgtcagagaatgaggaaaaacataggaaagtaaagagacagagatgggatattgtgtgtataaattctgtcttaagtctttgtctgacccctgaactgcacatgcacagggcagactgaaatcagtccacactgagatccaaaaagcacaaatttttcaatatgagattagccaaattaatgtcccatgagaacaaagatattagcactctttggctcaatgtaacacattgtccaagttaaggactccaagtctggagtatccacaattaacattgacgatgtctaagttaaaacccataattggccaggcacagtggctcacacctgtaatcccagcactttgggaggccaaggtgggcagatcacgaggtcgggagattgagatcatcctggctaacatggtgaaaccccgtctctactaaaaatacaaaaatttagccaggtgtggtggcgggcgcctgtagtcccagctgctcgggaggctgaggcaggagaattgtgtgaacccaggaggcagaggttgcagtgaaccaagatcgtgccactgcactccagcctggcaacagagcaagactccgtctcaagacaaaacaaaacaaaaacaaacaaccaaacaaataaaaaccccataattacttcaacccagtaaaatgttaccctttcttaaggataaagaaaatcaacagatgacaatcttaaaatcacccacatgttggaattactaggcaagaaaattaaagcaggtattaaaactgcgctttaagagatgaaagggaatatggttgaaatgaacaaaaagataggaaatctcagcagagaaataagaaattattaaaagaaccaaattggccaggtgcggtggctcacacctgtaatctcagcactttgggaggctgagggggcggatcacagggtcaagagatcgagaccatcctggctaacgtggtgaaaccccatctctactaaaaatacaaaaattagctgggtgtggtggcatgtgcctgtaattccagctactagggaggctgaggcaggagaattgcttgaacccaggaggcagaggttgcagtgagccgagattgcgccactgcactccatcctggcgacagagcaagacttcatctaaaaaaaaaaaaaaaaaaaaaaagaagaaccaaatgggaattttaaaacagagaaatgtattatattaaataaataaattagtaggattaacagtataatggaggaggggttgaaggaaaagtcattgaacttaaagatagatcaatagaaattatctaatctaaaaaggagtgagaaaaaagagtggataaaaaataagcagtatctcaaaaaccggaagtacaattttatttattttttatttaaaaatatttaattgacaaagattgtatatagtgaaagtgtgcattgtgattgttttatgcatacatttctcagtgattatcacaatcaagttaattcacacattcttcaccacccattctgtacattagatccctggaacttgttcaacttataactgaaatgttgtaccctttaatcaacatctccttattttctccaccaccatcccctggcaatcatcagtctttctgttgcaatgagattcacctttttataagatttcatgtaagtgagatcacagactatttgtctttctatatcttgcttattttacttagtataatgtcttacagattcattcatgttgttgaaaatgacaggtttgattatttttatggcaaaataatatttcattgtgtatatgtaccacattttctttattcatttatccgctttacccattgatggatacttaggtagtttccatcttttgggtattatgaataatgctgcaataattatgagggtacagatatctcttaaagatactgatttcatttcctttggatataaacccagaagtgggcttgctggatcatataattattctattttaaatttttttaggaaactccatactgttttccataatggctataccaatttacattcccacctacagtggacaagtgttttcgtttctccacattcttgcagatatttatctcttagcccttctgacaggcatgaggtgatatctcactgtagttttgatgtgcatttccctgatgattattgatgttgagcactttttaatatacttcttgcccatttgtatgccttctttggaaaaatgtctattcaggcctttttcctatttttaaattgagttattgttattatttttttttgccattgagttgtgtgagttctacatacattctgaatatcaacccttcatcagatatatagttgcaaatgttttctcccattcagtaggttgccttctcagtttttgtttcctttgctgtgaaaaaggtttttagtttggtgtagttctacttttttttatttttgcttttgttacctgtgcttttcgtgtcaatatccaaaaactctttgccaagaccaatgtcaaggagctttgttttacagttttggatcttacatttttaaattaaaaatttaaatctttaattcattttgagttaatttttgtgtacagtgcaagacaaggatccagtcttattcttttgcatttgagtatccagtttccccaaaaccacttattgaagagaatttcctttccttattgtgtatagttggtgcccttgccaaagattagttaaccatacaagtgtgcatttatttctgggctctcaattctattccattgacctaagtgtctgtttttatgctggtaccaaactattttgattactgtagcttcgtaagacaaattgaaatcacagagtgtgatgcctccagctttgttccttttcaagattgctatggctatctgtgatcttttgtggttccaaacaaatttcaggattgttttgtctatttctgtaaaaaatatcattataatattgatagattgcattgaatctgaaaatgctttaggtagcatgggcattttaaaaatagcaattctttcaattcacgaacgtgcaatatttttacacttgtttttgtcttcagtttctttcatcagtgtctaagagttttcagtgtaccaattcttcatcaacttggttaaatttatttcttagtatgttattgtatttgatactattgtaagtggaatcgttttataatttggatatctgtccccacaaacctcatgttgaaatttgatcccaatgttagctatcaggcctaatgagaggtgtttgatcgtgggggtagtttcctcataagtggtttgatgtccttcttgatgtattgagtgatttctttctctattggttcccatgagagccgattgttataaagagcctggcagctctctcttctttctctcttgccttgtaatctccacacactggcttcactttaccttctgccatgagtggaagcagcctgagctctcaccaggagctggtgccatgcttcttgtacatccggaaaagccatgagccaaaaaaactttttctctttataaattacccagccttaggtaataagcaatgcccacagactaagatggatctttttcttaatttcttagagagttctttattaatgtagggaactgcaactaatttttgtatgttacattgtatcctgaaactattgggttcatatatcgtttcaacaggtttttttttctttttttgctgcagtcttcagggtttttctacatataagattatgtcatctataaacagagaccatttaacttcttcctttccaatttttttcttgcctaattgctctggctaagaattccaatactatgtttaatagaaatagtgagagtgagtatgctttttcattcctaatcttagaggaaatgctttcagcttttcaccactgagtatgatgttttctatgggattgccatatttgatctttattatgttgaggtacgttccttctgtaccaaatttgttgaggctttttatcaagaaagcattgatttttgtcaggtgcttttcccgcactgttatccttcattgtgttaatgtgatgtatcacatttattgatttgtgtatgttgaaccatccttgcatcccagagataaatcccacctgatcatggtgtatgatccttttaatgtgctgttgaatttggtttggtggtactttgttgaagacttttgtatctatattcatctaagatattgctctgtaattttcttttcttgtagcactctttatatatatatatgtgtatatttattatactttaagttctagggtacatgtgcacaacgtgcaggtttgttacatatgcatgcatgtgccatgttggtgtgctgcacccattaactcatcatttacattaggtatatctcctaatgctatccctcccccctccccccaccccaaaacaggctctggtgtgtgatgttccccttcctgtgtccaagtgttctcattgttcaattcccacctatgagtgaggacatgcggtgtttggttttttgtccttgcgatagcttgctgatggtgtatatccataaagcactcttatccagctttggtatgagggcaatgctggccttgaaatgagttaggaagtgtgtcattcttgtaaacattttggaactgtttgagagggatgggcattaattttttaaagcttggtagaatccgctcatcaagacatctagttcttttgccaggcacggtggctcacacctgtaatcccagcaatttgggaggctgagacatgcagatcacttgaattctggaggttgagaccagcctggccaacacagtgaaaccccatctctactaaaaatacaaaaactagctgggtgtagtggtgggtgcctgtaatcccagctacttgggaagctgaagcaggagaatcacttgaactcaggagatggaggttgcagtgagccaaggtcacaccattgcactgcagcctgggtgacagagcaagactttgtctcaaaaaataaaagacatctagtcctgggcttttctttgatgggagaattttttattactgattcaatctccttacttgctattaatctgttccgaattttattatttatgatgcagtctttgcatcttatatgtttctaggaacttattttttactaagttatctaatctgttggaatgtaattgtttaatgtagtctttttataatcctgtgtgtttctgttctatcattttaattgtccattttccattacaaaattttaaattcgagtcttctttctttttttccttgggtaatctagctaaagatttatctgtcttcaaaaaacgaactcttaggtttactgatcttttctattatttttctattttctatttcatttatttctggtctaatttttaatatatccttattactgctgactttgtgcactttgttctttttttaattttttgaggtgtgaagttaagttgtttgagatttttcttcttttattaatgtaggcattcattgttatgtccttccctcttgttgtgtgcccattttcatttgtttaaagatatgcaagattttggttttgatttcttcttttacacattggctgttaagaagtgtattatttaattgccacatgtttgtgatttttccacttttattttttcatttttaatttctcctttgattgatttctaattttataatgtagtcagaaaagatacttgagataattttagttttttctaaatttgttaagatttgttctgtggcccaacatctgatctatttggagactgttccatgtgcacttgagaaaaatgtatattctactgctgttggatggaatgttctatatatgtctgtaggtctatttggtctgtagtacttttaaagaccactgtttccctggtgatttgctgtctatatgatctatccatttttgaaagtggaatattgaaatcttttactattattatactggtgtctatttttcccttctgttctgttaacatttaatttatatatttagattctctaatgttgagtgcatgtatatgtgcaattttttatatcctcttaatgaattgaccactttattatcatttaatgaccttctttgtgtcttctgatagattttgactgatagtctattttgtctgatataactataaccactcctattctcttttggttatcatttgaatggaatatcttttctcatgtcttcactttttggctctgtatcctttcagctaaagtgagcctcttataggcagcatattgttggattttacatatttgttttctgttgagccactctttgtattttgattggagaatttaatccatttacatttaaagtaattattgacaaataaggacttactattgccatttgttaattgtttactgactgttttgtagttcttttttttttttgagatggagtcttgctctgtcacccaggctagagtgcagtggtacaatcttggctcactgcaaactctgcctcccgggttcaagtgattctcctgcctcagcctcccgagtagctgggattgcaggtacctgccaccgcacccggctaattttgtatttttagtagagacggggtttcacgaacttggccaggatggtctcgaactcctgacctcatgattcactccccttggcctcccaaagtgctgggattacaggcatgagccaccatgcctggcctgttttgtagttcttttgtttctttcttccaatcttgctgtcttcttttgtattttattcaatttttgctttgattcatgtctctattttttgtgtctactagaggttttttcctgtggtcaccttgaggcatatataacacaccttgtaatgacaaccatcaaatttaaactgataacaacttaatttccattgcatataaaaactctgtatcttgcttttcccccaggcccccactttattgatataacattttatacctttttatattgtgtatccattaacaaatattctagctatagttgtttttgatattttttgtcttttatcttttatattaggcttaaaagggatttacaagagagaaattgtccatcccagtggttggaactcaagtatcaacaaacttcaccactatgggctaaaattctctggggtcctaaataaactttaaggcagtctgagccacaaggactgcaactcctaggcaagtcctagtgctctgctaggcttggagccagtggatgcaggggtcatatgacctagtgagacaccagacagggtggccaagggagggcttctgccacccctcctctgacaccaagcaatgcaattggtagctctgaaagagactcctttattccacttgaggagaggagtgaagagtaaacaggactttgtcttgcaacttggatcccactcagccacagtaggatagggcaccaagtagagtcttgaagcacccactttaggcactagcttccagataacatttctagatatactctgggctagaagggaatgtgctgccttgaagagaaggacccagccctggcaggattcatcacctgctgactaaagagcctttgggcctttcctaatcagcagcaatatccaggcagtacatgtcatgggcattgagtgagactctgaaacatgctggcttcaggtgtgatccagaacattcccagctgtggtggctacagggagagactacttctgcttgagaaaaacagatgggagagaaaaggggactttgtcttgcagcttagatgctagcttggccatagtgttgtagagcaggaagtgggctcttggggttcctgaatccaggacttggttcttgaatggcatttggggagtttccctaggctagaggggagctcaccacatggaaggatgagtcccaggcctggcagcattcaccacaagctgactgaagaacctttgggtcttgaatgaacattgacagtagcttgttagtactccccatgggcctgtggcagtggtgtccaagagaagagacttctgtgcttgtggaaaagacttgtcttgtggcttgcgtgccagctcagctgcagtagaatggagcaccaggtagattcttaaggtttcttactccaggccctggatcttagagggcctctctggaaccatctggggccgggggcattcggtgccatgaaaaaaaggacacagatgtggctggtgttggtaactgataattgtagaaccccagggccttgagtgaatgtaggcagcagccaaatagtggttatagtgggccttctgcaagacccagtgctgtgctggcctcaggtcagacccagcacagtctcagtggtgatggccacaggggaacttgtattatgtctctcccagcccagcaccaggcagctaagcacactcacacagagagactctgtttgggagaaagtaatggaagagaacaaaagtctctgcctagtaatccagagaattcttccagatcttgtacaagaccaccaatatggtaattctatgagtctgtaagagcctcagtgtaactgaccctggagtgcccccaatgtagacacagctgcattgaccaaaaatttagtcacaataaacaagtccctttgaatacctagaatgcttccccaagaagggtgggtacaaacaagtccagactgccaagactacaataaatacctacttcttcactgtgtagacattaacagacatccacaagcatcaagaccatccaggaagacatgacctcatcaagcaatctaaataaggcaccaaggatcaatctcagaaacacagagataacgtgaccttttagacagaattattgaggaaactcaataaaattcaagatagcatagagaaggaattcagaatcctatcagacaaatttaacaaatagattgacacaatttttaagaatcaaacagaaattctggaggtgaaaaatgcagttgacaccctgaagaatgcagcagcctcttaacgggagaattgatcaaacagaagaaagaattagtgagcttgaagaaggactgtttgaaaacatatttaggagacaaaaggacagaataaaaaagaatgaagcatgcctacaagatactcaacagggcaacagttattggtcttaaaagtgaggtaaagagagaggtagaggtagaaagtttgttctgaggacggtattagagaacttcacaagcctagagaaagatataattattcaagcacaagaaggttaaagaacaccaagcagatttaacctaaagaagactatctcaaagcatttaatagtcaaattcccaaaaggtcaaatataaggaaaaggattctaaaagtagaaagagaaaagaaacaaataacatacaacagagcatctggcatcagactcttcagtggaaaccttacagcccaggaaaaagtagcatgacatatttaaagtgctgaaggaataaactcttaccctataatagtatacctggtgaaatgtccttcaaacatgagggagaaataaagactttcccagacaaataaaagctgagggatttcatcaatatcagacctgttctacaggaaatgctaaatggagtacttcaattagaaagaaagggatgttaatgagcaataagaaatcatctgaaggtacaaaacttgcagtaacagtaaaaatattattactattacatagtacataatactactggtatgtacgtaatatgtacatagaaaaacaacattataatactgtaatcatatttggaagtatacttgaaatatactgatatcatacaatacagatttcaagacaaaaactacaagaagagataaagaaggtcactatgtaattataaaggggtcagtttagcaagaggatataacaactgtaaataaatatacacccaacactggagcacccagatatataaagcaaatattatcagagcttaacagagagatagaccccagtacagtaatagctgaagacatcaacatcccactttcagcaatgaacagatcatccatacagaaaatcagcaaagaaacattggacttaatctgcaccatagactgaatgaacctaatacatatttacataacatttcatccaacggctgcaaaatacgcatttttgtcatcagcatatggatcattctcaaggatacctaagactacaaaacaagctttaaaatattcaaaaatttgaaataatatcaaatatcttctctgatcaccatggaataaaactagaaattaataatgaagaattgtggaaactatacagacacatggaaattaaacagtgtactcctgagtgatcagttggtcaatgaagaaattatgaaggaaattttaaaagttttttgaaataaatgataatggaaacagaacatatcaaaactaagagggaaatttgtagtgacaagtgcctacatcaagaaagtagaaaaactttcaataaaaaaaccaacaatgcatcttagagaactagagaagcaagagtaaaccaaacccaaaatcggtagaattaaataaataataaagatcagtgcagaaataaatgcagttgaaatgaagaaaataatacaaaagatcagtgaaatgaaaagttggttttttgaaaagataaacaaaattgacagacattttgaaaagataaacaaaattgacagaaaaaaagatagaagacccaaataaataaaatcaaaattgaaaaaggttaccttacaattgatactacagaaattcaaaagaccattagaagctactataagcaactattaatacatgtaaataaattggaaaacctagaagaaatgagtaaattcctagacatatacaacctaccaggattgaaccatgaattccaatacctgaacagaccagtaataagtaatgagatggtagctgtaataaaaagtccttcagcaaaggaaaccctgggacctgatcgctttactgctgaattttaccaaacatttaaagaactaatgccaattctactcaaactattctgaaaaatagaagaggagggaatgtgtccatcttctgtgaggccagtatcatcctaataccaaaaccaaagacacatttaaaaaaaaaaagaaaagaaaacaaagaaaaccacaggccaatatccctgatgaacattgatgtaaaaatccataagcaaatactagtaacccaaattcaacaacacattaggatcatcatgaccaagtggaatttatcccaggcctcaatgattattcaacacatgcaaatcaatcaatataataccacatatcaacagaatgaaggacaagaaccatatgattatttcagttgatgctggaaaaaaacatttgttaagattcagtatcccctcatgataaaaaaaaaaccctcaaaaaactggatatcgaagtaacatatctcaacataataaaagccacatacaacagacccacagctagtatcatgctgagtggggaaaaactgaaagcctttaccctaagatctggaacatgacaaggatgctcactttcatcactgttattcaacataaaactagaagtcatagtagtacaattagagaagagaaagaaataatgctcatccaaactggaaagcaataagtcaaattttccttgttgggagatgagatgatcttatatttgaagacttcaccagaaaactattagaactgatcaataaattcagtaaatttgcaggatacaaagtcaacatacaaaagtcagtgacatttttatgtgtcaatggtgaataatctgaaaaagaaatttaaaaagtaattcaatttataatagctacagataaaattaaatacctaggaaataactgaagaagagaaagatctctacaataaaaactataaaagattgttgcaagatattgaaagggacacacaaaaaaatggaaagatattccatgttcatgaattggaaggatcaacattgttaaaatgcccatactacccaaggcagtctacagattcaatgtaatctctatcaaaataccaattacattcttcacagaaatagaaaacacaattataaaatttataggaaaccacaaaagacccacaatagccaaagatatcctgagcaaaaagaacaaaactaggaatatcacctgagttcaaattatactacagggctatagtaaccaaaagagcatggtactggcataccaacagtgtatatagcaatggaacagaatagagaacccagaagcaaattcatacgtttacagtgaactcattttcaacacaggtggcaagaacatacattggggaaagggcagtctcttcaataaatggtgctgggaaaactgaatacccacatgcagaagactgaaactagacccttctctctcattatatacaaaaatgaaatcaacatgaattaaagacttaagtctaatacctcaaactatgacactactgaaaaaaaaaacactgaggaaactttccaggacatttgactgggcaaatatttcttaataccccataagcacaagcaaccaaagcaaaaatggacatatgggatcacatcaaactaaaaagcttctgcacagcaaaggaaaccatcaacaaagtgaagagacaacccacagaatgagagaaagtgtttgcaaaatgtccatctgacagtgattaacaaccagaatatataaggagttcagacaactatatacaaaataatccaataatccaaataaaaaatggggaaaagatttgaatagacttttctcacaagaagacatacaaatcgcaaactggtatatgaaaaagtgctcaacatcattgatcatcagagaaatgcaaatcaaaactacaatgagatatcatctaactcccgttaaaatgacttacatccaaaagacaagcaataatgggtggtggtgaggatatggagaaaagagaatctttgtacactgttggcggaaatgtaaataagtataagtactatggagaacagcctggaggttcttcagaaaactaaaaacagatctaccatatggtccagcaatctgactgctaggtatatacccaaaacaaaggaaatcagtatattgaagatatatatgcactttcatgtttattgcagcactagttaaaatagctaagatttggtagcaacctaagtgtccattaacaaaagaatggataaagaaaatatggcccatatatgcaatggagtagtattcagccttaaaaaagaatgaggttctgtcattcttttttgtgtgtcagtgaggcacagaaagacaaacttaacatgttgtcacatatttctgggagctaaaaattaaaacaattgagctcacggagatagagagtagaatgacagttaccagaggttgggaagggtaactggggagtaggagccggggaagtggggatggttaatgagtacaaaacgatagctagaaagaaggagtaagatctagtatttgatcacccaacagggtgactagtcaaaaataatttaattgtatattttaaaataactaaaagagtgtagttggattctttgtaacacaaagcataaatgcttgaggtgatggatactccatttgcctttatgtgattattaggcattatgtgcctatatcaaaatatctcatgtaccccataaatatatatacttactgtgttccaaaaatattaaaataaaaagtttaaaagtatacctaataacaaataataaggagacaaataaccctattaaaaagtgatgtgcgtattaccatttcagtattagagtattctgattttgactatatgtttatttttaccagtaagttttattctttcatataattttattttatcatctagtatccttttatttccactccaagagctttctttagcatttcttctaagtcttgtgatgacctccctcagttttcctttgtctggttatgttattatccctccttcatttttgaaggacagcttttgtggatatactgttttatttggcaggttttttttttttttttcttttagcactttgaatctattattccattccctcctggcttacaaggtttttcttgagaaatctactgattgtcttttggatgttcacttatatggaacaaggctcttttctttcactactttcaagatctctctttgtctttcacttttgacaatttggttataatatgtcttagagcattcctgtttgggatctctcttggaagcctttatgctgcttgaatctgaatgtccatatgcctcccaggatttgggaacttttctgctagtatttctttatattagtttttgtcctcttactctgtctgtcttctctgggaattcctaattcatatttttgtacacttggtattgtcccataggttcctcatactttcatcatgctttttcagtctttttcttgttgttcctctaggtgggtaatttcaaattacctgtcatcatgttcatcaattctttttctgtatgattgagtctgctgttgaagccctgtattgaatttttcacttctgtcttcatacttttcagctatagggtatctgtttggtcctttttttatggaatataatatttaaactaaactaattttttaatgaattattttcctaattatattttgtggtttatttgtgttttctacatctcattggacttattgaaaatcattattttgagttctttttccctgtgctggcaggactgctctgagagagcagccaagaggaactggagctaagtgggagctcccttttaggatcctcagccaagacaaatgactgtcacctgaggcattagtgtgcatgacttcttccaggcccctttgtcgatgtttttgatacaggatgttggagctatttccatgtctgaagctgggaccatcattggcaagtctgtcatgtgggcttgattctaccctctcaaaatggccttcttaggtcttgggtgtcactagtgttcacaaccccctacttgagccccaaagtttcaactagggcacttttttttttgggataactagaaaatttttattgctgtgggggtatatgtctgagggacctcctgttctctcatgtagggtattgaagaacaagaataggacagagaaaatatttaaagactttaagaagaaaggttaaaaattcccaaattttgtgaaagacatgaagcttagtgaactctaaacacaataaacgtgaagaaaacaacacttgggaacatcatagtaaagctgctaaaaaccaaaaattatgctttatttaaaattgggtgaagtgttagggagacagcataatgtcctctgtgaacataattaagaaagatgagtaaatagtacaaggcagtgtttaagtacatggtctttagagtctccctctatcaactgctgctacttattaattttatgactttgagcccatttattttttttgagcatcattttatttatacaattgtgataataatgaaaataaaaccacttatatggctgatatacagattaaataatatatgcaaaactcttatcaaacacttagtagtagctaaataaataatagctattgttacttttctttttctgagtgtcttttggctagcttgtacctcttctaaatcctcaccattgtaaataatttttctttctcataatacctttatctgggtttgatatcagtgttcaagggccttatacaagagttgaggtgctttcctgttttctatggtccaatttttatcacatagacctcaacagatttttaaaggtttattaaattttatatttaaatatatttgggcctggtaatgtgtgtgtgtgtgtgtgtgtgtgtgcacgcgtgcatgtgtgtgtgtatgtttatataaatttctaaccacatatgtgatatctttataattgtcgaatcagagtttctagttcttcttaggcaagttatatttttctacaaaattgttcatattatttcacttgtaaaataacttgaacatttaagtcaaattagcataaagtatttcatagtattcagtaatcacttaaatgtccaaatagatttgttttttctttttaattttatttctatcttcttttttataataaaaattcccagagatttttctactttattagtcatttaaaaaaagcaacacttaattttgttgactgtctttacatttttgtttttcatttcccttatgctcagtattattgttacgtttcagcttttacattttttggttttacttttttgtaacttttctaatgtcttgataattttagtcttgtcttttctttttagcatattaacttaaagttgtactttgctccctaagactgtttagctgcattgcatgagttttgatatatagtcatgcatctcgtaatgacagggatacattctgagaaatgcattgttaggtgatttcatcattgtgtgagcatcatagagtgtacttagataaacgtagatggtatggcctattgtacacgtatgctgtatggtatagtcttttgcttataagttataattaataccgtgaatggagcttgcaagactggaagttgctctgagaaagttagtgagtgagtggttaatgaatgtgaaggcctaggacattactgtatgctactgtagactttataaacactgtacacttaggctacactaaatttataaaagtttcatatttcttcaataataaattaaccctagcttactgttaagtgttttactttataaacatattttttaactttttgaattttttgtaataacacttagtttaaagctcacataaattgtatagctgtacaaaatattttttctttacatctttattctgtattttttccatttaattttttttaactttttaaactttgctaaaaactaacaaaaatgcacacattagccaggtctacacagggtcgggatcatccatatcactgtcctccacctctacgtcttgtcccactggaaggtcttctggcgtaataacatgcatggagctgtcatctcctgtgataaaaattcctttttctgaaatattccctgaaggacctacctgatgctgttttacagttttctgaggttttatcagttttggaaaagattcatcatcatttcagatattgcatttttgtctttattttttttcattcttaaatacttattagatatgttagagttttttattttgtcatttatatctcctaatctttttaaaaaatatcttctatctctgttttatggtaggtaaattccttggaattatttttcagttcagtaatcctccctttagctccatttaatatgataaattctcacttcagatattaattttaatgacaattttatttctataaatctctgtatatttatcaaatctgcctttttcatagtttctttctttttttattttggccctcagattagttccctaagattgtgccctattttgaacttaatgcgtacatttcatttaaagtttttcatctgctgactcatttatggatgaacctttcttcggatttgatatttttgatatatgagctctttttcattggtgtttgctttttctgtgagactcccacatgacctgagttgttgaaggtatcctgcaaaagtggatttgtttcttctaggtattccagatctattaggaggttgccattctcagtgattacagttattgcaaactttatttgtacccctaaatttctcaggttattactgagctggataattcccctgggagggttgtggtagaatcatagtaatgccaaataccctagctctatcttcttgatttctaagttcctttcttatgaaacattttaaaacttttatgtatttgatgtttatatattcgtacagaaatgtttctataggacctttatattttaatagaaacatttctgtgtgaatatagcctgacattttaaagaaaagtctttcctatttctttggcttgaatgcctttcgtatacctttatattttaatagaaacatttctatctgaatatagcctggcattttaaaggaaactctttcctattcctttgccttttctccaaggcatttctggctaactccctccttcatttcttttgggtcttcacttgaatgtgatctttccataatttctttgctggtccccctatctaaaatttcaaccccaactcccaatcccatcatttacttttccctttccctgctttattttaattccttagcgcagataattgtctgtcattctatatatttattatcagacatccacaacaaatatatataatctccatgagatcagaaatttccatctattttgttcactcctaaatcaccaccacttggaacaatgcctgtcacatagtaagtactcaataaacattttagaataaatgaatgaaatatccaatggttgtatattgtgtgctttgtcctgaactaggtggtgatgacaaaaaagaaagaaaataaaccagattctagccctcatgaagacgatggtcttgcagggaacatagactactaaaatcacagtttatcacctctgattgacaaaggctatgaattcagatgaactcttgatgagcttattggtaccaggtagatattccctgagaagtatggggatggggtgattacttttgttatgcggtgcatctcagacttgttctgtctgaatattgaccaaataatacacatacacacatatacgtacacagaaaagataacgatttagacagaaaacaattttaatgagggagctgacataagtttgaccaaattagtaagaatactgaaagcaactaagtatgaaaatagaatttccgatgaagtatttttggtaccagttttttcttgcagggttggtagccactgtctgatgagcacaaaatgcaaaaaattagcctaactctacattctgctgccttgtaattgcacctaaagagcaagaacacatttgccttttatacttctgcaagtagtacatagaaaaggatatgctgttactttattatagtaaataataaggttcatggctatatttacaaaggttgagttttcagcatgtgaaatgatgtgaagaatgttaaatctctaatacgtgtttaatgtacatttcagttgatttttctccaactataatagtagcaattattttatttatatgaggggaagactgcgtcacctaagggaaaagctaatagatttcttggcagtttttgtatcatgttgaaatctttttccatttctaactgctgtgaaattctcgctactctgtcttacacatttttttttatgtattaaccctaacaccaacttacttttctctgcatttaagcccttatttcatctatgttttcctacctaaaatgtattatcctggttacttgatgaagttttagctcaatcttgttgcagacgctggctggccaaggtaaaggaactaatcaatagtgagccccttctcctaaatgccatagataatgctaatagctacttgtatacatataatctcattaagtcatcataaaaacataaaattttatataatataaaaattttatattatataaaatccccctcattttaaatatgattaatctgaatattagagatggttatgtaagtttacctaggacacatacctagtaagctttaattcaaactcaaaacttctaattgaaagtggttgctgttgttgtgattccattgctttttctaggtactataccttcatcctacctagaattgcttttgaagtttttctgccttgcctttgattgaacagaatttacaataaaagattttctacatcatcaaggcttccacagagttcaaatgaaaacactttttaggggtagctgttaactgcctacttttatagtctcttgattgaaagctactgctctaaatttactgctcatatttttgaactcatgtttgtcttatacatctgacaaatacttattaagtgttgactgtgtgtcaggcactaaactagaccctgggtatagagtagtgaataaagtagtgtggcctctatggagtatacaatctagtgggaaagaaagagataataaacacataagccaataatcaccccaataatttaaactgtcatatatgccacaaaagaataaaatagtggaggtatctgtctcaggaactatagctagaagaagttttttagagaaagtataagaaccacataattggttaggaactgcagaactctttcagtgaactctgtgtaacagtttcttccataccgagtatctgttaacaggtaggatttggacaactcattcttgtccaatgtggggccaaactaacgaggctttctaacctggtgttaacatttgagactcaaattctcatattttaagtttgtactgattaagaggaaaaataggtagaaaaagcacaagaaaatagattggaagattagtcctttaaagattgggaataacttgtttacgaatgtgattccttaattttttatgcagtgtgaattttcttaatcatcaagaatacaagctaacacaattcatgcaacattcctttagccaatatttaagacctacctaccacacattatgtactgtgctaagtaaaaactacagatgtaatggtgaataagatacaaatgctggtccccaagtttacagtcttatgtaaaagacaattccagtgcaataaaatgattattatgacaggattagacacaggatatcagattctggaggagataatatctaaactaagaccccagggatgtatacaagcaggccagtaaaattttcacattttctgagaataaatcattgatttcaatagccataacttcaagttgaggatattttgaaaatataatttttaatattttctaaattttaggttcttaaatacatttttaaattagctcttaaacttttattttaaaagttgtgaagtttaagttaagtcataaaaacccaacagctattttctctagaatatgctgtgaagtgtggattataggacaattagaattattaacacttagtgtattgtagatgaggtttctacttgagagttcaaatttatcatgtttatacatgaaatttgatattaaattctttcattttaagtggcattaattatagaaaattcaaattttgcagtttttgtaaataagctttagtttttcgtggattttatagctttattacagcttatctgacctaaggtctagacagatcaactgtgccgttgggttaacggtgtttaccatatgatttccttttccttctttattgcactttatctgtttccagttcacagtgttgattaatagataactgtgctcctcatacttcctctttcttataggcagatagcttttcaaaatgaagggccagacctagctcagtaatttacaaaataagcataagtttttcaagtctacttgacaatttatagttcttactcttcataggactttctgttgagagaaaccacagaagccaggtacctcaattttcaaaagtaaaattggctttattgatgagtaaagtgtacattttataataaccatataataatgatacaacatccagctctgtagtgggtccagaaggactaaatacatattaaataaaataaaattattttgaattacatagtcttctctcaaaatatcaaatttaaatgtaaagcatgtaaaatagtcctgtggatgcttcctcagtcatgggtgaaattctttttgtttaaatttaggtttagagctcttctatggagtcgttgtacccacaggcccaggtgagatccttgttagtactctaagtgaattagcaagtagatttattaatggcttaaggggcatctctagccaggcccaactagtatgaagggaagatgaactatttctgtattctgtaacatagaattggacctatcccactggagaacacagctatgccaacctagaagtaaaaagaacttcaaacaaacaaacaaacaaacaaacactctatagtatatctgcatctggaatggtgctaatagtaacttcacccaatgcgagtgaaacaactctagcaattacatgaactgtgtgggaatctgaagacacgccacttaacaactcaggatctgtgctgtcctttaaatcaaaacacaaataaggactagaacaacatcagtatgcatccatttctgtcttcccagccataagaaaaaaactgactctaacgtttttttttacttagagttgcaaacctcatatataaggctctggtcatctgcaggatctccttagaatacataaaaaggtgataagtgcctacatgtgattgctaagaccattacacggcaccttggtccaattccagttgagtaattatattcattttgtccttattttccttttcctgattgtttcagttaaatgtggaaagtgatccttcatttttcacccagagaagttcggcagtgttgctgcacgtattatttagactttactgcctttcttttcagtcataggaatggagcttaaaagtgctggttagaattgttattgtggctattactattgttgcagtgttgcctgattcagaaatgttctgtgaacatcaagcacatgactggcttttggatgagctgctggactgtagggtgatgtcttcaacaagccttctttatctccttactccttgcctagcttagttccttagcttaaagggacagacatgctttcccttttcatacaactatgatagtactaacagttcccttttatcaaatgcttacctcatggctggcactgtgctagttcctttatatggctataacatataacctgcatagacaacctcgtagggtgagtaacatgatcaccattttacagacagaaaatttaaattgcttaggatcacagaactaaagatggggagctggaatttgattccaggtttgtttgatggcaaaagctaagtgcttaactaccaccctacctcataactctactgcttcccagaactctgagccccagtctatggatcactgatcacacaaatagcttcttaccttctcttagtgtttgtcaccacttcacacagattgaccccattgacctcacattggaataatcctgcagcactggcctcagaagggcattgctgattatgtttacaggccagcaggaaactgaactgctattgagagaatctctatgctgaatcattttatctgcataacaaaagtggtttgctctatcttcttttctttccctggtggtgttgtcataacagtgtcttttagcaggattaaccagtaactaacttatttgctttggtttccaataaataactgcagcctgttaataattgtgcatgtgttttatgtggcctcagataaactgagacaatcttacacatctgcattccagattgggtcactattccttcatacttaatctcctattatgtaactgtccattaacaaaaaatagatcacataaggaaaaaacttaaatacttaatttgctagtgcattaataagtgatactaatacacatgactttttattgttacctaaagataggtgtttgctcagaaatataaaaaataaacctagtgtatgttttcttgctttaaaatgtaccaaatctgtcacaaatgctttgaactgtattgtgtttacttcttcatgtgagctgtgtctaaacattttttagtgtttttaaattgttagctcaatgagggtaaggtgtgtcctaatttatctgttagcacgttgcagtgccaaacacagcaccatgcaggcagtagatgctcactgaatgtgattgaattagtgaataagttaggctgtgctaggttgaagagatttgaagtcctaaattattcttgccatcatttcactctgcataataagtaaagaagttttactaagatgatttaaaaatgtgttattgaattacttgtgtagattccaaagcactgggataaaaaagaccctggctatgcccctttgaggaagcagtgagggtgtttctcactgtaggcacagttactgggttttatttgtgactgaattaatttatttctcttaggaaggttacatttatgaattcaatatagcattttataactttttccttttacccctaccctacctactattattttttcctattataaaagtcatgcttattgtagataattaactatatatgaaagtaaaaagaaaaaattaaaatcatccaaagtcttattatccagatataatcactcttaattctttgttttgttctttgttttttcttattcacataatttcatactgtccatgtaattggtagtctacatgtttatataatattttagcatcataatactataaatttgcatttttccgtaaaatttaaaatattctttaaagtaccttgttaaattttgccaaatattcctttatatagatgtgctatgctttatttaattatttttctattagatatttaggttgcttatagttttttactgtcataaaaattatcttttttacataaatttctgttggttttctattacatttgattcctgggactaaaattactgagtaaaaatattgaactttgggttcttgatacatagtactcagtgggtttctagaaagtcttttgtaatccacattcccatcagaatatacgaagatgttgttttattgagccatcatcaaaattattacctctatatacttttaagcagtattataaagtggacttactgactataatgtgttgctgtaatcgactgtgctcagaagaactatataaattaaacatgtccgtttgctttcaaaaagaattttttttttttttgagatggagcctctctcttgtcacccaggctggagtgcaatagcgtaatctcgggctagtctcgaactcctgacctcaggtgatcagcccacctcagcctcccatagtgctgggattacaggcgtgagccaccactcctggctagaactaggaaatatttttaagagtaccagtagttcccaggctgtatgttgcaatacagtttccacctaaatccaaatgtttttcaggtctaattgtaaactgctacttttgtttaatgtggacttacatagtcttctgtatcaatacctacttcgctggcagttttgtcaaagtgtgttgagttgaggcattttgcattatatccgacgtggtgttagcattccttcttgtagcaatcaatttcatttctatttgctgttgtaactcaaagttaacgaacattcaaagtttactttcatttattcatgcatttttttgtggactgctctacaaaagcacctttcttccttaacaacattctatccaaactgagtgcagatgaatctgagtagtttcattttagagagcagcagtcatatttgtattaggaaggcaatagtcttggaagaataccaaaaaaaaaaatcattttaaagtgtttgcctcgtcctctagtgaaagcatttgagtttcagaggccatggtgagtcagagtcccttgctagtgcttatgatacactgctaagggactctgtgtgtgtgtgtgtgtgtgtgtgtgtgtatatatatatattttcagatatatgaaatatcctatagggaaaatattgataaaaaataatttacctctttatgcactgaaacttttcctacttctctgcaggaattgttgcaacataaatactggttccaacttagtaaattaatttttacttatatgatatatttcttttacatttcagaattgatgaattgcaagtttgtgccccatagctgcacaggtatgtatatgaattacctataactatgtaaatctatatattaactaacaagttataatatttttatgtattaaaattgcttatagatttcataatgtaaaaatgttaattcttgattacttacagataatgacagcttcaaaggatagtacattttatacatatattttattttattctattgtaagaatcaagtaaacatttctaagatttgataaggcaaataattttaattacaaagcattcatctggtgaagagattattttatggaattgtactattaaagtgaacggtgatgtggggtcagaccattgcaaaaccacagttttgccattattgttttatttaaacttttttttattttgctgcttttgagtttattttctgtgatggttgctttaggtatggagtggttgcagatgtactgtctgctccactgtctcaagcactagacgaatgggaaaaaaaaatgtttgcacctgtttaaaatctcaaccatgcagtgttgtggttcctgggcaacaggcaggaattctcaaaagcttggttgcacctgctcaattgttgcttgcagctgtgtcatatgagtgagagcacagagaagcttgttagcagtgtgcttgtgctcttacgtgttttgtgtactctgactctgaaagattcttacttgatgtagaccttgaactgttacattggtttattctaaaactcactggttttagcttctgaatattttctttaaatcctctgttttatgactcaaatattttttttttagtagctgttgactgccctagataatgtgtatgccaacttctcgaaagaatatctgggagagtagatctcttcagataactgggttgataataatttttgtcctggtagagacattttgtgtttggctcaatttcaccgtgttggcagccccactatgtgaggctggatgtagttattgatccatttagctgaacagatttgaaagcatttggctattagtggacacatggggcatattcagaaaatttaagggtatattgtaagataattccttaatttgtgcatgtgtttctgttgctgttggggtagaagtgagagagaaaaaaagtgaagattaaatagtaattctaaaagaggggctaaaatccagatgtagattttatggaatattattctttaatttaacaaatgctagatgcttggtattttttcacaaatgttactggtaatgatattaaatgtattttagttgtggctttgtatgttttctgacagatatctatatttttgatatagacaagctattatagattgtatattttactaataggtaaagttctataaatgcaataaaaagctgcaactcaatattaaagatatttaattaatttattcagtaggctcaaatttctcatattgaaaacatccaaatgacttgcattactctccttaatgtattcttttaaatgctgaggagtttccgtcggtatttagtaacataaatctggtcttagagttggtgtgtcttttccttttattggcccatttggaatccttttttgtatttttaacaaatcactttggtatgaatttaacctctttggaagtaggaaacacagtacaaaggtaagtagaggattgccacagcctcttatacaatgccttgtacatagtagttgatcagtaaatgttgaatgaatgcatttatgaataaaacatttctggagttgtattagaaatagagggattgtgtcctaaaatcttattacttgttatacagtttagataagtcttgatggcctttagttctcatactgccagttacatagatatgagaatactgataaattctgtccttaaaatgagaaattaatgtataagaactgatcctttttgactattttaatgaataattgaaataacactatttgcaatatgctttaaactaacttttacttattacaagaagtctgtatgttattcccattatacacataaggctgaggcattaatggctaagttacttgtcaccttggaaatactttgcagcccataaataaacaaatctatgttatatggttaatgcctcgtctttcctgagcactggcttatgcttctccctccctatctctatctcactaaaacacaaaaataaaatgtgtgtttaattcctttgggtcagttaagatcagaatattaaaaaatctgtaattatttttctaagcaaaagtaatggaccctgtgtttactgtatacatgtttataattatggtctctatgactcactaaattttaattataaatagaggtaaagccaagcaagagtagagtcaaaatagaacagttaagacttgctttagatagatcattctaatgttccgttttgtgtggcataagcccgtcacataagattggcacagtttacataataagccagttatctattgcattaaaaccttttgtttaggcttctcaaattttagtaccactggtttatgacacatgtacttttaggcatggaactacctttcctctgggaacagtttttcttttacctcagttcacaccagtgtgcaagaggccaatatcaaagacatcggttttttccagtgaatcttagtgtggtagattgaactctatctctctgttagtctcaatattagaaattaggagatgagccaagaatatatatttgctagaatattaatcattaaactagacagatattagcagctttttgagggtcctgtgtcaggaattagcctggaatctcaaagagggaggaattcctatgccctaggattcctgagcattattgcaggttcccctgcgatttcagggttaaggaaataaagaaagaaaatccacatttattaagaacatagcatgactagatataatttcttttttcccccttctttccctctctcctttcctcatttccttttattctgcatggtgaatggatgtctgctgtttgctagaaattgtgctaggctagatgaatacaacaaaatctttgttctcaagaggatacaggctagtgagagacaaagatatatcaatagagttctttttgacttcaccacttattattagtatggtctcaatcaagttacctaatgtttctgttcccttgtttactcatttgtaaaactgggaaaataatagtatctgttgtctgagagttaataacacactacatgtaagattcttggtccactggttggcacatagcaagtactgaagaaatcttagctatgctactgtcatttctatcactaccagttccctcgccatcaccactactgcagtttagactctgaaaaaagaacatctaattgcctgggagcagggatcctggttgggcattatcacatagattgtactcaaaggttctatacaaagttacctctgcttccctggccttagaagatattataaaaatcatgaagcaatgtactgaatctaaaagaccttcatgtgatatttttattattttccccaaatttttgtatttgggaaaaatacacacaacatgaagtttactatcttaactattttttggtatacagttcaatggtattaaatacatttatgatgcttgcacagccatcaccacaatacatctctatataacactttcatgttgtaaaactaaaatactatacccattaaaatataacttcccatttccctctgcactcccacccccagcctctggcagccaccattttagtgtctgtctctgtcattttgacttctctatgtagttatataagtggaatcatatagtatttctcttctcgtgtttggcttatttcacttagcgtaatgtcctcagcattcatccatgtggtagtacatgtcaggatttccttgtttttatggctgaataataattaattgcatgtatataccacattttgcctgtccattcactcatcagtggacacttggattgcttccatgttttaattattatgaacaatttggctatgaatataggtgtacaactatctctctgagaacctgctttcaatgcttttgagtatatacccagaagtggaattgctagattgtatggtaattccattttcatgtgttcttataataagattaatttcatttaaattgaataaagccttttaggttgtgtttgtgaatagcattgatttcctcataaggagaataagttgagttaggtttagcaagaacacatctactgcttatgtgagttcaaatgctttcaacacgcctgtgaattccttaaataaatcaccatcttggaacccagtgatgcacttaggatatctggattgtaaatctcatgcttgagtttgaatttaggagctttggattccctcccactgacctttaccaaaagtctagctccattattcagtagctgtgcgacctcatcgaggttggcagagcttactaagcctcaagctttcctatgtatagtatggtggtaacaacacctacctttttaatggtggatatgtggattaaagtaaattaggtatacaaaatactttattttgtgcaccactaccacctatgtattattgcatagtagtctctgtgtattattttttcctctcttctcttgacaaaatataaaaatttttataatcagtagtataggaatttcaaggaagtgtgggacacatacattaagaaagttaactttggtccaattatggctcttgtgatatctgttgcttatctcagttcaacataattagactcataatttctaactatacatgccacatttctatagaaggctagggctgtttaaagaaaaacttaagatggggatgctcacattcacttcaatgtctgttgattatggaggtatgtcttgcaatagaaagcgtgttgacacaacccagacaactctcatccctcttctgaaagtcagatacctttaaaagcagtctcttgcaaaggatgaagaacccatgcttgatgagttactttcatatgcatcaaaatgacttaaaagtggtcctgttggtaatctaagcagcctcaggtttagtgagcatagttgtcagtgcataaatcgctgtgtaaggttttattttttcttgagaaggaaattagtgtggtaagattttctgatttccttctatgcaaactcaacagtagaaaagtggatttatgaatttatatgtatgattttcccttaattatctttaataataactagatgatcttaattatagtaaaccattttcctctgccaggctgtttatattgcagcagtatcttcttgtacagcaatcagaaaaggattcttttaaaataatgaaaacatcactagataatatatatagaattgattattactcaccagaggtaatacagacctgcctaatatcaaatgtatagtttcgaccatgatgaatcaaggtaaatattgatgattaatggaatttttatttagttgggaatattacaaaggaccacaaacttggtggcttaaacagacatttgttttctcacagttcagaagtctgaaatcaaggtttattagccaggttggttcttctcagggctgtgagggaaggatctgttccagcctttctccttgacatatagatggccatctccttcctatgtctctccatatgtcttcctctgtcttccctctgtaagtatctgtctctgtccccagatttctctgcttttataaggacatcagtcatattgaattcaggcccaccctaattgcattattttaactcgattacctctttagagacctatgtccaagtaagatcacatttggaagtacttggggttagaactccaacacatgtttttttttggaggggttggggaacaaaatttagttcatcataactgggttaatgatagttaacatttattgagtgactttcatgttccagatgctatatatatacatatgcacatttatgtgagtgtatatgtatatatatgcatgtatgtatatatagatatgtaatatccaatatatgtatgcatatatgttttatgatccttgcaacagccctgtgaggaagatgttatttctcccattttgcaggtgagaaaacaaaatgtcagagaggataagcaatttgtccaaagtcatatagcttgtaaatattcaatgctggtatttgaacctagcatcccgtgctgcattttaaatggataaacctgataaaaactcagtcaaaagcccaaagatactttgaacatttaaggtttttgtgttttgttgttgttgttgttgttgtcattaggacttgtgtcaagggacattttatctatcaaaaatggtgcataaatgcctaatcactgactgccgacgtgtttactcctgaattttttactgacaattgtcttcgaaggcttagtgttttagcgctcctgaacctgataaagcttttggacaggatggaatctgaacatagactgcaagcgttgattctggcccccatttgtatggatggcactgagagacaagtcatgcccagagtctgctactcagcacttgtgctttctactctccttttctctcactccctccccttcctcatcttttttttttcactatttaccaggtagcttgtgatttttttcttttatccagtctttgccataagtgataaacatcaaaaggggatggagtgaagagtcacaaaattgggaacatttctgcttacatgaaagccagttcacttgtaggtgtgttgtgtaccctggccacaggcttattgttattcacactaaagagcaaggcacattgtgtaccttacataagttttccaacttaccaatgaaaacagtttgtttctcactttgaagctttaaagcagaacttgttcatgacccaatttcactaataattctcttaagtaacccttgtactcatttaaagatttttttccacccactgtctgtctagcctggtttaaaatttttatatatgtacttttaaaaaattgattagctggagagctgcccattcctctgtgctgtataataaggattttaaaactgcacactgaattctgtatagtgtaattaaaactgacccacatttggacctgagtacaccaggacttagccaaacttgccatgagctgagttctggtggcagatgggaactaatgaggacacactccactccagaatttcccagctgcttggcccctttttgtacaaacaaggtttggagcgaagtccggatcccaagagcatgttctgtaaatgtgctgtacccaatgatttgggaaatgttctcacaaaattgggctgtttcaaggtatccataaggcctcagtgactttcagatttaaattcaaagaggcctttgtgctttctacaaccaatttttaattttaaagtgaataaaacatcgcattcccccatcttttctcttatgcctggtgatggaatgatcactttatatcacaacctggaaatttgcaggtcattatctcagagacagttgtccatcaggatagacaaagtctccttgcaacctatggatctcttcaactagtttgatgtcctgggactattcaggcagatgtaattgaatcagtttgaagcagctgtagctggcatgtggtctctcagattgctagcacctgcttgttttttttgcaactcactagagtgagagaagtgccaaaaccagcattggtcttggagcagataaagcactccagatcttatatcccattccccttccaacctagccacatcatcactggtgccgaaattaataaaatcccttttcatgattaggtctgaggtatacttttacttctcattcttctctgtattcagatcctgacagtactgaccatgcaaatccaaaaaaataagggagtataatggtgatcaggtggctttggggctctcttatcattagacaactgggtagcctgtggtttgcagaatcatttaaatgaatgcaccaaatttatttgctgttccagcacagtcttattggcacagagaataagcagttaatgtataacaaactgtgagctgttatggaatatgatgaatacacttccttagcaagacggaatgtaaaatggagctatctctctaaaataaggtctaaactaaccactgtggatttcttcaacacttactatgtgcaggaaaatgaagtatactaaaagagagatacaaattttaggacataataagtatgtaaaatatattttgaaatacacagatttggatattttttttttttggagatggagtctcgctctgtcgcccaggctggagtgcagaggcgcgatcacggctcactgcaacctccacttcctgggttcaaacaattctcctgcctcagccttccgagtagctgggactacaggtgcccgccaccacacccgtctagttttttgtattttagtagagacggggtttcaccatgttgcccgggctggtctcaaactcctgagctcaggcaatccacctgcctgggcctcccaaagtgctaggattacaggcatgagccaccacgcctggctggatttttaaaaaatgtttaaactcatttaagaagtagttatcttctctttgtttcattttattatttggcaggtatatatttaatcgttaagtgttatcaatatcctaatgttgaatttgaatctggtcatggtaaagacaatatatttacttacattttatagcttatgttacaaagtttttctaaaatgggttcaatattgataatattttgagagaagctatgacataaatggagttcacaatagtaataagagtgaattctaaaatggtaatttattgtcatcagcaaatgcctatgtttcaaggcatgactacatgctgtgagcatagagaagtattacatgcaagaatcttatgatacttgaggagacatgatacaggttttttaaaaaataaaacaaggcactctcagtgtcaaattgcatgcttagacctggatttggtgtaaaataaatgctacaaacattttttttaagttaggcagtctatttgtgaagtcaatgttctaaattcagcatcccctgtctccccttcactgtccatgaaacaacactaatccattatggctgtctctgtcactacaccaaaacttgacctcagagtccctctgaagacagtactttgacaaccataccaattgttggaagtttcatgtaataggaaacccatttgccattgttgaaaaagaatcattaagtgctaaagatatttagtggaggcagagatctctgtgaactgctgggaagaggctgaacttaagctgggccttgaaaaaaacatgaagcataggacataaggaaatagaaaggagaacatcaagcatcgccaagctaagtaatgcatacaagtgagttcagattggaattatatggcatagtcaaagataacgaatagacctcaggtgtaaataaataagtggttatataattattagtttaatgtttttctcctccgccagactgtaaactctgtgaaatgtgataatattattattatttttcttccttttttattatactttaagttctagggtacatgtgcacaatgtgcaggtttgttacatatgtgtacatgtgccatgttggtgtgctgcaccccttaacttgtcatttacattaggtacatctcctaatgcaatccctcccccgtctccccaccccaggacaggcccggtgtgtgatgttccccaccctgtgtccaagtgttctcattgttcaattcccacctatgagtgagaacatgcggtatttggttttctgtccttgtgacagtttgctcagaatgatggtttctagcttcatccatgtccctacgctactcagaccatcctatccgagttagatctcccatgtgtttctgtaggttcttattgttttcattcacatacacaatttacttcacagtttacggtgcagattatcactgccaagattctgtatgaggaatataggggaactcaaagaagattttgttctttttaaatttatttaagaacaataattttttaagaagctgatttttatttttataaatactgtggtgctttcaacactggcttggaggaatttctattttaactgcagtatttaagaattttactgttaatacatatctctggtttcagggaataaagagacaatataatagagtagaaagagtacagggtttagaaatagaagagagggatttaagtttctctgttatcacttattggctatgagatataggcagctcttcgtgtgcttttacgctcagtttcctcatctgtaaattagagatgacaacataccaaagcactttaaaattaaaaacatctcttcttcttcctcctctcattagtcatcataatcataatgctattctgaaaccatgtaataaaatatggtcttctgtatagatccttttttttctaccacttattatttgctctagttattgcagatttactctacaccttgagtagagcattatactaatctaaaaagaagcaagaattccagaaacaccctataacctagtcatggctaatatttactgttgagttatttgcacctcaataacagttctctgtcatttgtaatataactgcttaatattaataatttatgtattaaaagtaaatgttttataccaatcccaaacagtgcctttttatgatttattttttattcactcattcatttaatgcaaattattgtagctactgacacaaatgtattcactttctacctgattatataggaataccctaattatctatattcacatcttattgaacttataaagtgttaggagaccagtgtctgagaaaaaaagtcaaatataaatagattcatctctgagttgtaagaaccttttgttcccacctttagaatatttggtgactaattaattactaatagtaattaatgcacacctcttaagttaaaaaaccaaaagaaaaagaatttgatatttgcagttttctaggaagttaacgttttcattctttcctgctttaaacatgtaatatctaatagttaatatctgcatgtatcatccttatggttttgagagtctttaagggaaattatgaatacaatttctatttttctaaacgaaaggatttctgtgcattagggtaaaaatgtgtgaatagatatttcacacattcatatttgtgtaaaatatattttcaaaatatatttcttaagctatttaaaaatatatttttaaaagtatttaaactttttacactacatttcattgttatattttgttaagcatatcaaaagaagattataccacaggttatgactttttaaaggtaaaaaaattaaataaggtaggactatctgaaagttaagatttaagtgtaagtacataaaaatatgcacagaaagtaaatagagatattgaaaattaactaaaatgttgcttttataatggcttaaatttgtgtagcaaataggatagctgagtttagtattacttaagaaatggttaattttgtatatcaggagacaattcaaacataatctttaatcatgctgatctgatgcctcaagccgtgatctgtatacttattagggtctttgccaagtctcatgatagtatatactctagaccaaaataaaattgattttcctctatgtaaatttgttactgatattatatttaaatttccattgatgaaaaataggtatatttactctctgaatcaagttcttcaggaacataaataattttttatttgagaactgatttatgtccaattaagtaatttccagtatacttttgctattgatcatatatcattgtaagatattaattatttacatcaatataccacttggatttttaaaaatataaaggcctcactttgtcacccaggctggagtgcagtggcatgatcatggctcactgcagtctcaacctcccaggcagtcctcccatctcagcttcccagtagctgggactacaggtgtgcaccaccatgctcagcagatgtttaaattttttttttgtagaaatgggggtctcactatgttgcccatgctggtctcaaactcctgggctccagcagtcctcctgcctcagcctcccaaagtgctggatttacaggcgtgagccactgcacccagcctattaattttcttttctttctttctttctttttttttttttaatgaccaattccacgttaagatcagtttctggcttgcttgaaaggattggatcagaagatgttgcatcacttttggagggcatctgcatttgatttaagagggaacagctccaaatagagggcagtacatttcgtttgaggcttactactaccagaaaccatcactgcaacctcttaagttttctcattgatttttatttgtccttatgtgctcctatcaattgggggctttgagatcactatttacacttataaaacttctgtatgtcttcctctgttttagtcctagagagtacagggaaagtgtactagttacctatggctgctgtagtaaattatgataaactgggtgacttaaaaacgacagaaatttattctctcacagttctggaggctagaaatcagaaatcaaaatgcagcagggccacattccctctgaaggctcacagtgaaaatctttccctggctcttccagcttctgatggtcccatttattctttggcttttggcactatgacgtcaaactctgccttcatctttacagcaccttcccctctgtatgtgtccctctgtgtcctctcctcctattaaaagcatatcagttattggatttagggcccaccttaaatccaggatgattttatctcatggttcttaattagttgcatctgcaaggaccgtatctcccaggaatgttacattctgaggttccaggtgaacatgaaattttggggactctagtcaacattcaacctactatagagagtaatgttattttttggtagtaaatatctatggaagacttatttacacactgctatggtttgaatttttgtcccctccaaaactcatgttgaaagttaagccccagtgtggcagtattgagagctggggcctttaagaggtgggtcatgagggcccatgaatggatgagtcttttcttgggttaatgaattactgggttatcatgggaatgggactggtagctttatagaaacataaagagagacctgcgctagcacagtctgcccccttgccatgtgatgtcctacgttgtctcaggattctagagtgttgtcacggcaagaaggctttcaccagttttgctccctcaaccttggacttcccagcctccaactataagagataaatttcctttcttataaattgctgagttacaagtattccgttataggcgacaggaaacagactaagacatatgctaacatgttaattatttttcccctcggtatttgacaaagtttatcctgtcctctgtttttagaatacttgtagccttagcaccttcgtattttttatgaatttcatggaattatgaatcattttctgtcatacttttttaaactactgaaacttctcattatagatgacaaggttgaggcatagaataggtaaccaacagtcactaactctgcagatggactgcagaactaaaaactgacattggtatcatccaacttttctgtcaatccatgtgtgttgagatgccaaatatactcttatagtccatggtactttcacataactttacttgtgacctaagtaaatcaagagttgcagaaaatgtttttcgtaatgatctccagataatataagccaagtatacaattgaaatttagtgtcgtagatggacaaaagtattgtgctggatgactgcatgttgagatcacaatccatctaatttctctgcttagcatcggccaggtctttattagagaactatggatatggccatacgtacaaatacacatccattaaatgaacactggaatcatgaatatccaggtctagattaaaagagcaagcccaaggctcagaaagttaatttctaactttaaatagctagtaaatggctgacacaggactaaactcagctctgctcaactcagacacctgtttttctatttctcccaagttgattctcaaactgcaggaaatctttgtgttttccccttttaagtaagaagcagaccactattagggtgagtgggtagagggagcagaaggtgaagtaaaccattcctaaaataattgggatataattggaagcatttgctgaccctttccacctcatggttgtaggatattacaagtatgttttctttaagaatgctcaataagccaacatagataaatttgaattttaaacatagataattaatagagtgattatattaattaatcagaaccagtattataggtctcatctactgaacatttcttttaactttcagctcttttggtgcacttctgttctggataaaatataattgtatgctcagaggacagaaaaattttacaaatgagcttaggcttccctgccagaaaagaaaggatgaaatagaaatgaaaatgaaaattaagtaatccctgaaatgataatatagttaaatgtgaaaatatgcctttgataataccaaactgggatttgcacccaaaacacattaattggattaacctgttttagtttgtcttgtatctgttgccgaaaaaaaaaagaagaaactattattttgttagatagcagatttctttctggtgttgattactcttctatcatgagtaaataattacaattcagttgatctcaggcactagagacagagctctgaactagaagaccgagagagagagacactaaacaaattaacatacaactacaacaaaaaggatgaagaatggctggtaatccggaggcagggtgtaggtgtcctttctgaggaaataaagtttgaattataagacttgaatgacgtgaaggagccattcaagggaagatcttgtgtacaagaaatgcaatctctaaatcattacaggttacacagagttgtgcatccaaggtttgtgtgtattagagtagctgtgacaagggaggagtgttctgtcaactattaacaatgtatagttgggaggtctgcttcttcaggggcaaccagtttatcctcctctttatcctggtactaaatatagccatagtaagcatttgggaatggattaaaaatgcttaaccaaatctccttaaactttgccatatcctataaattttaaccatatctcctgaaattttgttatttctgaaagcagaactaagtttggccacaaagggagggattgaattcattgctactcttagctctccctagcaatttcattgtctgctctggtaccagggtttgttagaggagctacaggggtttttgagccatcatttctccctttcgcaaatcacttcttcaagtagtagtatcagcccttttcctccttttctgtatatcaagactgaaactgaaaatgaagggttaaacttatttttttttattagtctcataggagcccaagatttaacatagaactttttcggaatatatagttatctctccatttgaggtgagcacaggatgtctatttttctcatttctactttcatcttgaaacagaaatttcaccaaaagcttcattcaaaatgttttattcatagctaagcaaagatgtatggtggtaaatcattgaaactgatgatctttgattgaattttccatagtttaatgtgtctaatcaacagttcattcaccacattattttcccattgctcgatgttataccagataacagtattaccatgacccaggctgatactatgtgaaaaaatgcacaaggaagtaggccgtctactgtgaacatttgaaaaacacagtcagatgacagtttcagaaattgtgaggtttttagatgtgagaatctaacttttttcactacagatactaaaaatctatcaatatactttttagtaggctttagccacatcctaatttacaaatgaacctatggtgtgtgattaagaacacaccggccgggcgcggtggctcacgcctgtaatcccagcactttgggaggccgaggcgggcggatcacgaggtcaggagatcgacaccatcccggctaaaacggtgaaaccccgtctctactaaaaatacaaaaaattagccgggcgtagtggcgggcgcctgtagtcccagctacttgggaggctgaggcaggagaatggcgtgaacccgggaggcggagcttgcagtgagccgagatcgcggcactgcactccagcttgggcgacagagcgagactccgtctcaaaaaaaaaaaaaaaaaaaaaaaaaaaaaaaaaaaaaaggaacacaccattcttaccagttataccccttgaatcttaccaaggaaattcccatggttctgtccttatcacaatggaacccagaaatgaaggaatgaactacttgctttcttagaaataccacagtgcagactttgctgtatctaacagatatgaccatataatttgtcatctgaataacgatcgagagatttttgctttaaaaatatataaccaaatgataggaatattaagtcacaatggaagaaggccattattatactgaagcctcaagtaccacaaattaaaaacaagatggatattactattttaacttgtgagcatgcactatcaggttatccaatatcaaaaacatattaagagtgcttgtggcaatatatacctgaattataaatgaatgttgatattttgacattattttgtatatatgagagcattaatcaaggatagattcaacaagtcagcttcgtggttgtggctttaagttggcagtgaagtatgtaagtaatacatttctgatcagttttgtttgatagtcttgtttcaacaccttggcagaactaaaccattgagacccagaggtacttgtgcatggggatggtctttaagataatatttagtttattcaatgaaccaaaattttcagtacatttattgtttgtttttgtcataaagacatggctacagtctacatacaaaataccaagtagagatttgtttattgtagtaggtacaggtgctcaaaattgatatttaagtctcaaacatatttttccaccattctgtattggattattaacacatgaaaatatgtactgttagaactataaggtaacttacagattattctttgagctaatttaattattattttacaaatgaggaaatgaaatcccagtgaagttgaatgatttactgtgggactagagaagtctagaatgagaaatttaacagtgcagtactctttacttccatgtatatacctttcaccatttaccattacactgaacaatctttctgctatttgtatttttaaaatgtgctcacagggttaaaaaatttgaatggtacacaaggatataaagtgaaaagtatgtctttaccgactgatagcactattcaccagagataaaaagtttcaactgtacttgtgtagagaaatgtgtctatatacctttaatttaaaaacagaaagggaatcatactgttcaaatacatttgtacttttttcttaatgccatgtcttagagattttatatattctagaaattttatagtgtttatattttggtatattatattttaccttttcctctttttaaacagctacttaatatttccattttatggatgtcacaaaatgtatttaaccactgcctatttatggaaatttggttatttacagtttcttcgctgtttaaaaatattacaaaacagctttctaaatatatccttgtttttattttaatatccacatagcatactttcttagatatgtttatataattaaaattttgatgcctgttaaaaattttccttcaaaaacatttttctgacacacacatgtaacaacattatatgagaattcctgctttctcacagcctcatcagtactgggctttagcaaatttttcctaatcagaaaagtgaaaatgatatttcaccattgttttgatttacatttctttactcaggagttagattaaacaacatattaaaatttcactggccatttacatttttgtttacttttttgtgaattggctataatacttttctgtatttttctattgagtttttaaaaatattttattggtttgtatagcctctttgtatattatggaaaataaattttctgtagtatgtgttagacatatttcttggttattaatttgctttttgagttttgtatatgtagaaaaattttttatgtagtttcattttttcaataatttcctttatggcttagaaaacttcttacaccagaaaaattactcagattttcttctagcacatttatgatttagtctcttaatatttacatctttgattcaaccaaaacttatttttgagaatgaaaataaagtttaattttatcacttgaaataaaagcaccaatttttttaattctttgaaatttcatgaattttagatttttctgaagctttatgaactttttaggaaggcagcgatcatcactaaggtaaaaagaaagcatattagaccaagaaatgtaattttaaaattgacatttcttattacttatcaatccctgatgtctattcttggtgacataggaaaatcccaagaaaacatcttctttataaaaatatataattatattttgctaatttaagcaatgattaaatcagtgaaaccatcatagaataaatcaaacccctagtgagatacttttaacagcaaatccagttcatatggtaatactaattttatttacttaacaaaagcacttacttatcagtaagaccctatatctgtacaaatgaaatcaaaatgtgaaagttgtaatttaagcgggacacaatagcttggtgataaatagatttatttgtaccttgaaaagttcacttcaagtaatcattgttattaaaaggcaattatttcacatggtttttgtaagcataaaaagcagattggagactctttctaagagttgtgctgactgacatctttgtaagatttgtaaataagtgaaagatccattcagctagaaaagttgaatattcagtaataaaagaacattgaccagtttaacatctattatgtttacgtctgtagttgacaaggagagaagtaaatataggtgaaatgtgaaatctaagtaggagagagggattaggaaatgtcatttaacttttttcctactcttcattttatttttaatatcatatttatatttcctttctaaaagtagtacgctatcagtgtaaaactatttggaaaacacaaaaagacagaaagaagacaagaaaatcaccattgatattactattaccacttaaagaaaaagttattcttaatattttggtgtgtatatgtatgtgtgcatgcaacaacataggattatgcaaggttatgattctgatttttcaactagcaatatattatgaatatttgtttctgtcaatattttttgtgacatgatttttttaattgattatatagtattccatacaatggatgtgttataatttacctagctgatctctaatttttggacatgtaagttgcttccaatttttctccagtaaacatgaattacaatgaatattattgtgacaatcttttttataaacatccctgattatgtcatcaggtaaatacttaagtgtaataattgaatcaaagatatatgtattttaagggttttgatacatttagctataccatttacacattgctgtgtctgtcccagcagtctctgaaagtatctatttgttcatatcctcatcagttcttggcataaaacttaatatggttcaaagaaaaactctcagtggtctgggaagaatgaatacaaagaggtgggaagaggtcaagcagaggtaagtgatgtttttgtctaagagatgttgcaggctgcctcaggctatggagaacagctttctccaaagcaaacttgcactttcaaaggcggcccggactctgcgtgctaacttggcacagttgagatgtctctgtttgctttaaggcagtggcctgacccttcaagcacaccccatgtattcagtgatcgagaccacttactcatactaatcattgcacacagaaaatacataaaagatttgtattcatcactcaatatattttgctcctcaagtgtcatgaaacattcagggtacattaactggcaaatgcacacctggagtatgttacttagctttagaaactgctaatttttaaaaaatcaaatatttaattttgaggaaaaaaatcagttttggattttgagcatatatatcatctttcattttggcccaattaacccagcaggtgtgtgtaaattaggtcactactttgtcaccgtggtaacatgcattggggaggtggatcttaaccacctccagcacaggtgatgttggctgagttggtattaagaggtgctttagaaacaaacaaggcagaatttaatatgttagagtgtagaaaataggtctgacgtcggataccaacagataattctatcacacaaaagcaagtactgcctcaaatctgtataaataaggaagatctaatgagcctcagaaacaggaattgtattgtaaaacttactgacaatctctgaaagaacagacactatagcactcaggaggcggtagtctcatttcctcatggagcaagggatttgaaggtcagggtcaggttctctgcaatttaaggctgtttttagaactaagccgtggttttcggaggatcaacaacttcctgactactcattccagtgactagattttagtcactactgagggtttttttttaaagtgcagtgtctaattatttcttttaaatgctgtttggatcattattcataattgtttatgggttaagaagttggcagagttggtttatgccagcactccagcactcatacagtccccataactcaggcttcttctcaccaggtggaaaatcagacatgcttcaagatcgctagttgagattgtgcaatctgtttggctgctaaaggttccaaattatgtgggcattctgcagccccacagagtggtagaatttcttcacttatcactgacaagttcacacttctttgggtcactaaaattgtaaatttgcattatcagatgcagaaaacaggccaaattaataatgttaaatatatgtccaaggaaatgcatctcccatgaccatttgcagcacccagatacggatgataattccatcgaggctttggtgccaattcgtacctggctttataattttcagtttgcccttatgtcctgctttacatttgtatagcttgttataatcttgaagcatttttgtgtaccatatttcttttttgtgtgttattttagacatggcatttcagaaacttgaatgagcctagtgtttattttcagttggttgtgaccgcagctttattagttattttgtgtgttttcaataattgttaatatttacaaaacactgaacaaacctcttcaagattgctttacataatctccttttccatgtgtcaaggatgagagctacagagagaagagtcatagtgactcaccccgtatcacagagtatgtgaatttactttcaaaggagagtcaagggtccctggttttcagttctttttttttttttttttaattctccaagagtcatgcaggtttggagacttacaaagggatagcattgctgagtggagaaacatttgactcaagtactcttttacccctaacatctattttaccatttccctccctatattcaagtcttcttttccatcatctctccagtagatgctgaaaaccatttctttttgaagagctggttcatatgataaagacccaaagtctcaataaaatctattaacctgttaagggtaagtgtatgcattgttcactggagagcatgatgccatattctaccctgtctgcttgggaacaaggccgatggcagcacaaattagcatcagaacagagctttatcgcagtggaatcccaggttgttttaggaatgagacacgaaacaaaaatagataaagggattaaatctatcaaatataatagaggaaattgtagtagattcagggaacttggacccctgaattgtagtaaccaaactggagaggaaatggacagttaaacaaagtagggctgtttctttttttcattgtttgatgaaataatttttgccccttttaaatggtatgttaaaagagaaagagggagcctggtatatctgaaacaaagagcttacacagtcaccaagctggttggtttttataccttcctttactgagtattgtccttcagtacaatacagagccatttctttgttctcacaagctagcagttaaattgtatgtaaatgtatgcaaattagatgctgtctaataaagagagtcattagatggaagaaatatttagtttagaaaaaaaagcaggtgtattgtgtaaaagaaaatgtaaggctacaaaaaaagcccaaacttttgtggacagttatagaaaaaattattaaaatagatttttaaaagacttacgtcttcctgacctttcttttgtgcttatatatatgtgtgtgttttaaaaatatttacatataaaactaagggattggcttctttcccagaattactggaagcaccttcaccaggaacatttggacttgaataatctccacagcagcattttccttcttgaattaaatgaattgtaaaatgaatgatttgcccaagaacactgactgcttatttgggttcctttcccgtaggttgatagaggcttagtggctccatgatgtgtatcttgctattttaaggtttcctttccacactactccactccagcctctctaatatgaacttcttaatagagacctagactataagctccttgagaggaaccaacagttccttttaaactttatcaatgctgtattcagtgtttagcacaatgcctagtatttactagcacttctatctattttttaataaatgaatggttggttttaatggttgattaagtagttatgggtatgtcaaacacctttgtattctctagcatatagttattgaaacaatttctcaggcttgcatttagcaattatatagtaaatgcctagtgaaaaaaatagtttaccatccagtttccttaagccaactgtaacaaaggtgttgagtgttcaccactacattatttattgtggcagctatttctggggcaaaaatgaataggcagcatagttctgtttaggagcagctaatctactaaaggtatcagatagatatacacatatttaataaatagtacactgtactatggaaggatgagataaaatattatggaagcattagagagaaagagagaatttccaatctatgggtatcataggtggtttcttggaggaaagtggaactgaactaagcctcgaagttggtaaggaacagatggttggctatggtagggtggagaaaagcagagttgcagaattctcttatgttgtagtcccaaattaatagtaatgtactagattttcttctcctctcttgtgaatttccagcaacagcttgattttaacctccacagaaacacaaatgagagctgtgatggaaacaataattactagagtccagttttaactccaagtcaaaattttagtcacattcagccctgaataagaaataaggcaaagcatgcaacaggactttataactttttaattttaaggcattataaatataaatttttattttatcttatttttttagagatggggtcttgctctgttgcccagacaggagtgtagtggcaccttcttagcttactgcagccttgaactgttgggctcaagcgatccttctgcctcagcctgctgagtatgaggatgcaaaggcataagaatgacacaatggactttagggactcagggggaaagggtgtgagggataaaagactacaaattgtgtgcagtgtatactgctcaagtgatgagtgcaccaaaatctcacaaatcaccactaaagaacttactcatgtaaccaaacaccacctgttccccaataacctatgagaataaaaaattaaaaaaaaaaaaaacaaactacaggtgcatgccaccataccccgctaattttaaaaaaaattttgtagagatggggatcttgctgttttgcccaggctggccttgaactcctggcctcaagtgatcttcctgccttggcctcccaaagtgctggggttacaggtgtgagccactgcactgagcctaaaatttattattcataatgtataatattgtccatggtgtgaaataaaatttgggggataggagatttagggacctagaatggaatacctcatgtacgtaaagtgtcttgcagttcacaaagcaccttcctaaattattattttaattacagttattgaggtagcagaactggtgttattattttaattttgcagatgagggaactgaggttccaaaaagttaaatcacttagccaggaaatgtcatagccaggtttttctgataggttgtccagttctttccacatgcctcattgtcacccagaagcaacacaagggagggttatatagttctatataactctctctatgcttctatacgcatcatatatcttgttttctaatgttattctaaatatttttcattcacttggttttatatccccattttctccattttaacatgggtaaaatatgtaagacccaaactgagggagatgtgtatgggtaagaaactgattattttggtaactggtatggatatgaaaaccataacgagtctgtggattgcaagcattttaatttattttcttgacttttgagttaaagaaaagatttcaatgtgaaggtgcaaaatatgctgcactgaactaatcttggaggtaaccaaagggctgtgggactaacagcttttgatattacttagtgcttattattgttattattattatttctttttaattatgcaaagtgctaatcagtttgattatgcacagtgctaatcaggttaattatgcaaagtgctaatcagttcttcttgaagcacacgaggagagcagaggtgctggcggtgaatggcatagctagatgggggtagtcacggcagtcattccttattaagataggagtagacaagatagcaagggggatttatccataaaaataaataggaaaagaaagaggactatgagcacatgaaagattgtagtttgggcaggacattgcttacacatagaaagctcctcccccctgtagcatagtttggttggatagtctctgctatattttgaaggcactcatttgaagccaaaaagactgtagagggaaggaaacagagtattgtatagctagacaagttgtcaaaacaacttattgtagttggcaagcaccaattcctgggaggacagtaaaggaagtagaatctaatagacctgtacatgaaaaaggacatcaataaagagaactgaaaaattaagggagtgccattctgataaaataaacagggccatctcactgctgcattgttactgggacggccgtctgtgtagcctgtttcctgaggtgaactgagggctggcttcttggtgctggcagtggtctctattgagagtggtgatgacgaatatgacaataagggttttatgtaatagctcctagttggatcagctttgctgctgctgaaatcaaagtgaattttaatattaacttgcaggtctgtgcttattaagctgtgtgacttcctgtgaagatgagtttacagcaatatgttcatatgtttttacagaacaatcatgatggtgctcccttaagaatgccctttgtattctgtcctcctgttctattctgtggtttgataagctatcaatgaaatgctgtgatatctacttgtttgaatgtattcagagagcaaaaagcatttcaggattgtttagtgaatattcatttttttaaaaaatgttttcagtccatgagatttttcctttactctggagtttaagcaaatgtatacgttatttataaaagggagggtctgcttccctctatataacctgacagaatatttatttaccttttctttttaagcctatgtctaagcacagctcatcttcacaaactgaagtggatcttgatttctggaaatgtccaaataatggtaagagtgctacagaggcaaagtcattgatgatacctccagaataggatgtattcataagttatttgtccaggcagtgttggttcttggataaagacaggctttcagttttcataatttctttaacctggaacaatttcattttaaaatatgaagagaatgacataaatctttggtttccaaggagagtctggaaagaaatagattgttagaggacagcgcccacaaattgagaaagcctgttgggggccctttgggaatttggctggaaaattatgttataagcagtccttctgctcagcttcatgggaacatggttttagaaatgaaatattgcttctgtgttccccaccccccaaaactaagacaaagatgaaatattcatattatcctttattttcagaaccttttgtgttatttctcaatatgttaaaaaactttccttaattccttaatgattctgcccaaagggtactttgtaaattctattcattgatggtgtactaaactcttaattcctggtgaaggcatttgaagccaaagaccttgctacataagacatttataatgtcactgggatgtttaaaggagaaaatcatgtgatccaaatggcaaataaaaataaatttagtaacatctaactaaatatgaccagttttccatttaattacatgcttgcacccactttacacacattcacatatatgaacccgttaattccttcactaaaccgtgttatttgagcacctgattttttttaagtgctcactatgtgctagttatagtaccataaactctcctagatactggagatacagttgaccataaaagagacaagatacctggcctcgtggagctcactcacacaggataacatgatagtttctcatgatattcagccttagaaaccaagcttttgtatttcatttcttctcagaacttcttttagcaatctatatgattcgattactgggcctcagtatcttcaattagtctcaaaataagaggtaggacttgatggttctcaaggcaccttcatgtcattcatattcgctgtcctaaagtctattagttgattagactatgaagtgaaatgtatccattattaccatatgagcagccttgaaatcatacagagttctttgggactttgatcttttaggaaataagtaatttctagctaattctgtggacactacctccttggatttaggccaaaattgaatttagaaagggcggactttgaaatattccacagtttgaattttggcacttgcagttactagctgagcaagtcataaccaaccactttgatcctctgattcctcttagtttgtacttcaaacagtgagtatgagtatttaataaatactccatagtcagtccttttttttttttatttctggcaactgtaggcttcatgactcttgttaccaaaaatgtcttcaactaattcaacttcctttccccaaacgtcttatttctgcattaagccattacttcagttaactcagtattttctctcccattacatctttacagttttatttcttcctgttctctttcttatgtgcttttacttctctactcaacctgagtcaacttttggctacttaaattatcatatgtaacataatcttggttacaacacaaaatgtgtgcaactataattcaagtcaattaaatagaaatatgttttctacatcagacctgtgccgtagttgtttatatttttgacttactagtgtactggaaacctcttgagtacaagggttgtggttttaatccttgtgttcccagtatctagcatggattctgccagtaagcatgtcacaatctagcaagaagaaagaatttgaaagcagtaggaattttaaagcaacaggatatatgatctgttagtaggaaagtggagatgttgggaaaggctcatggaatagatattgggaaggctttatggagcaaataatatttgagtttgcttatttaaaaagggtacttattctttttttcctggcaggaagtgaaagtaaactctaggcagagagaagatcatgaaaagactcatgcatacataaagttgggaggaactgggaccaggagacagaaacgaagacaagaagggaagattaggagcatattttgaaggtcctatgtgttgtttagtcttacttgaataatcttagctttccaaaataagtatatatagttgtggtatagagagtgtggtgttgcaataagatgatcattagcttttttatgaagaagaaataataagacttagcaactgattaatacaagaaaaaagacaatgagagatcatgtcagaaagaacatctggatctgggttgcagccccactccacacttgatttgtgaccttaaatacttaacttcatcttcctaaaccacatatcttttaagatcactcactcactgattattattgaagagggcccctattccggatgctttggatcccagaggttgagaataattggtgttttttaaggagaaagatacattttataccagtagcacatttagcctaagctggtattagggcatttgggaagatgaaaaggaagacatataaaagcaatatgttctggccagaaaaaggcaaaaaggaccctaaaactaaagtagagttatagcttagagtatctaagaaggcagagatactgaaagatgtatttagcagagctctgcatttgggggtgaacatctatccatggacctaaagagatcatagattgccctgatttgtctaccctctatgtaggaagttaactcctgtgattggtaactaaccaaaaaattaaaagaaaggggagatggggcaggggagataataagagggtatttgccagtggtttacaaagctttgaggtgtacgtgtatgtggttgggacaaggttaatttcatgtcagtagtcatggccttctcctttcttgtatcacagaaaagacttcttcttctcattctcttccatttcttctaagaactctcttcatgccagctaggtgtcaaaacttgggtagtgtggaattgggggaatgaaaaatagaactggaaaagtgatcataggggaggggaactcaaaagtgacaaaatttcacttgggtaaaaggaaggggctagagacaggaaaaatgaggagggaggaaagaaaagtacccataagggatagaagggatggagaaaagacttagaggtgaaagtaagggtagagagagacttttgatgcaaagtggttgtccatgtggagaataaagtggccaagactaagaacagagattttctgtcttattcttcttggtattttcttgagaaactgaatgaaatttgactttttaatatatattgaggggtgtgtgcgtgtgtctgtctgtctgtttctgcttggctgctatttctttggatcaaaactagggattacctgtgcagcaactttgttcccacattcccaccaccatcaccactgaagcaaggctcagaattttcagtcctttttagtcagtagacttctgtgattaatgctccattaatcacttgttcttcgtattaagtataaccccataaaaatatgggattggagggagaatggtcaaccagtatgtgattcatactagatgacagtcctctcaagatggccctaatttcttgtgcatttcacctacatgctgatcttaattcatgtgtttttacttgataggggtcagatgaacaaagtaatttcatattaactatgacaaatttgtgcataggtgaaagaaaagacctctacttttcagacattattattttctggaataatctttggggattaggtagccaattaatcaagatccccataagaaatgttagcaagtaagacaatatccagtaaaacactattagccaacattgttattcaggaattaaagttcaggtaggatagctttggcatcatgagattattctctgtgagactgacctattgccaatgacgtatatgtacatgctttaattgatgtgtgggaacttggtgccaccctactgctgagatttcaaggattgtgtgaagattttgtgacagtaattacacactttttatcagatagattttatgtattatcacatgtccaatttagaaattttcctttgtttttatttttggcattaaaaaaggaatgcatacttcataaacttacatttttgctatttgtttgtaagaaaggaattccaagtgggttatgtaacattaagcatatggctacacaaagattagaaaagctgtggccatcaggaataaatattggtgataacactgatgggatttcacacatatagtttattgtgagaaaatcagaaagacttgcacagaacttagataaggaaataggcttgttttttgatgaaaatataaaaggaagcatttgttattaacacggtaggctttgaaatttggctttctacttccacttaagaggaaacaccttaagtctgatgaattttttcctatggtagacagtacttaatctagtattactagattaaaccccttagtaatcaaacattttaaaccaataaaatatctctgaagagcaaaatgtaccactgctccagattcttccatgatgtcaaaaacatagaagcaacaaatgtggacctgatttagtagtcaagggaaaatatgatgtgatggagaattaataaaagactattttaatattgggaatgaaaaactaccacaaatcttaagggtttacattagcagaacttggtttggtttgagtagacttaaaacaagattttgagcgagcttctaaggagttttgaggatcattttttttctgtcatgaatttatgctacataacaaatgcagaaattggagaagtgtaaatctatcatttcttttgacatttatgtagcttcagtaacctcctaagttgagatcatttgagatttttagaacatggatacctctagaaaaaatgaggaggtgccagtagctcctcagaaatagcttagcttcacattgaaggaagattcataaggtctttatggagcaaagatatttgatcagaacaaacattcttatcatatggaacctttttcctgcaaaaaaaaatgactgttagggtaattaaattggttatttgcagcttctctcctttcccctcttccctcttccacctgcacagtattgttatattgagttgccatgataagagtaaaaaataatcaaaccaacctatacacatttttattatgaacaaaaaatacttggaaggattctattgatacaagctaatgcaagataataatttgtttattcaaaagtgttttgaatgtccttttccattgatcatgtgcaactggtataaacaaagatcctatgtatggtagagagcttatatttgcatttctttgtatatttaagcatttttagcagacttacatttctgtttattgacagtactctttagaatttgtgcaatcatatgtatatatcagcagcagacatttgggtaggtagtgaaggtaagttctatagtcagtgtaactagaagattatataaattaattatattagttttgatgctttgggtaaaatcagtgtgctacatgaacctccagttacacaggacaatatactgtgctcaaaagacatgaaggcagactaagagtacagaaaagctgttggttttgtttggggagttcctggctttttatccgcttggggaaggagcaggtcttattgtcagttgccaagtgctctgatgctgagaagtttgtcagctgtggttactttggggattttggcaatgataagcacttttccttgagaaaaatcagcatagataccacacattggaattggacaaattgcttttattttctattttctttaaaaatcaaattggcttttccttcttgtcccagctgttgcagcttccttgttttttagcttagatgatgggagaaacacatgttccctgagatccagagtaaagcttacttattttcttcctgtacagactacgtgaagttacgatactggccccaaatctaactaaacaaagttattcagaagagatttgacagagagggtgtctaacaggtgttgagctggggtaattgaatgggtatttcaaagatattaatgtaactcgcatatattagaaagctttaattgccatctccagcatgtttagacctgaaaacttcagggacctaacctgttccatagagaagtctttttatgcccctatggtttatagctggaaacaaagtatgtatgtaagagttggattggggcaggtgcggtggctcactcctgtaatctcagcactttgagaggcggaggcaggtggatcacttgaggccaggagtttgagaccagcctggccaacatggtgagatcccatctctactgaaaataccaagttagccgggcgtggtggggtgcgtctgtaaccctggctactcaggaggctgagtcatgagaatcgctggaatctgggaggtggaggttgcaatgagacgagattgtgccagtgcactccaacctgggtgatagagctgaattggttgaagtagtacacagtaaggcactaaacaaacttgaccttttctataaattccttcactttccctgtaacctgttacttttcaaagggaaagatcacatctatatttctagtcagcttgctatcatggtaaggaaccaagattcccttccagttagggtagtggaagatgaaagtggcttttcttcttgatatctggatcaacctggttttcctgccatctcttatttcataaacaagcttatcatctgacctagctgcagatcgtgttttaaaatttgcccctacccctgctcctctcttaagagccgagtgcccacagaacattatcctcctcatctggacctatctttgctcttactgaagggggctttttcatcctataattccttttctgttggcttttcttgggaaagcagtttaagaaacattcattaactatttctgggtgtcagaaactatgtactatgtttccagagaattggaactaataaaatgtatacctgtatagaagagatgttttataaggaattgactcacatgactgtggaagctcacaagtcccaagatctatagtcagaaagctagaggccccagagagccaattgcgttagtccaacgtattagtccaaaggcttgagacctgggaaagctaatggtatagtcctagtctgaacttccttaggccagagacctgcagagagctgatgtttccagtttgagtctgaagacaggaaaaaaaaaggaatgttccagctcaaaggctgtcaagcaggagaaattccctattacctgtgagagagtcagcctttttgttctgttccagcctccaactgtttggagatgagggaggccaatctgctttactcagttactgattcaaatgttaatctcatccagaaacattctcactgaagtacaccaaataatgtttgaccaaatgtctgagcaccctgtggctcagtcaagttgacctataaaattagccattacacctccattacctaatttaatcctgaccaaaacacaaccccaaaccccatgaagtagacactattggttattatcaccaaatttaatgactaagagtaaggtgtctagagtgagattgcccttactagaattctgtcttcgccccttactgtataacaataggcaaattactcaaccttagtttcttcatctctaaatctgggatgataacactacatacttggttgagttattatgataattaaatggaataatgcatgtaaaacacttagcatcgataactggaacatagcttagtactcagtgaaggacagctattatttaaatacatgaggaaataaagtttcatagtggttaagatctttgcccaaggtcatgtagctagtaactggtgaaattgggatttgaacttaagctgtttgcctccaaaattatgcatttaattcctctctattaatcttaacacagaagtagaataatgtaatggttaagcctctggcgttggactccacggttcaaatcttggctatctcattcaccagaaggctttaggcaagttagttaacttatctgtactttagtttcttaatctctaaaacagaaatgaaatagtatctttcccggagtcacatagaatcagatcatttctagggatactaccttcatccatgaattttaaatgatataatttaagacacaagatttctcctttttccttcaaattatactggttgttattgatatgggtaagtaagatttatgaaatctagtgaagcactaaaaatatgctaacatattcgtaatgttacagatagcatggctttgcaacaaatttcttcagaaacttttttgagagggagaatgaaaatgatagttttcattcagaataattgtaaatatcttcaaaatgaagttcaaatccatggataggaggtggaaggaagccaagaaggaatccattataaggtgaaaatcataagtcctctttttgtgactctatcttgcccgtttaatagaagtgatataagtaagatctgccacctaggaccaaatatttctttctctagtacttaagacaagaagacgcagaatttcagaatactgtatgtgggttctcatctgtcaaccaaaagcagctgaaaaggcgagagccctggagaaatgtttcctacatatgtatttgtttttagacaaatgtgtttgtttaaaagtctaaaaaccatggaaatgggtaccatggaaatgcatagttgaggggtagaagccctagaagtgttgactcaattcttgatccttctgtgtgatgtattaaatgccacatgcttcagtttgctgtgtgtggggtctttcagcactatttataatagatggcaatcctgtgtgaaggacataagaaaatttctgattcgtttttcaagagactaatgagaagttggttgtcatctggctgttgcttatgggaggaaaactccagagaaaattataatgtgtatattactcttccttccaaaaaaattttatttgaggttaaaattaatattaagggcagccgtaaaggggaaacataaaatccatatgcagattgaagaagtgtggcaatgaaggggcaaaagttggagttaccctcttgcctcaagtggttggagaaattgtaagccaattgcatatatttcagtcttaacacttttgtatacttctcaatttcttttaaaatttaactccggaagtcatagttagaaatttgtcttctttaccaacttcctccatgcattacctatcgcccatctacctcctaaaatttggagtcttctcaaagcaggcaatatttgtagatagtattatatgaaaatgttggaatccagtgaaaatttttatggtaaacatagatggaaatgtcctctttgctataagatagtagctactttaagtattttttcctttgaataatgttgttcatgtcaattgccaaaaaaaaaatccttgtaattatatgaaaataaaaaggaaaaaatacttaagaaataggagaccaggagggaaattataattgaatctggaaaccattttttttaaccttggctaaataaataagaaatgataagaggtacaatacaataagaaatgagagatactgaggttcaagcagactgctttatttaactccatttaattttattggattgaatttgatggagacaatgtcaatggacatatatatgaagattggtagcagaattcctggggctgttttatcattgtcatgaacatgtacaaacagaaagggaatgctaagtaattctgaatgtactagtgatttttagataacagatttcagttttacaaattcactgagccagcaggtggaagcagatctgtcacctgtatctagttcttgatttcaatatactaggaaagcaaatacatcaatatcacatttttttcttttcttcctttgccaagatgtatttaggatgttttctcagcattacagaactctcagctaaaagatacgtttcagtttcatttttagaggaagaagaaaatgttaagtgggctgctagcaatttttaattgctgatagcaattaaacaccaaacttaatgtcccttggcctctttggttttcttatagagtgaagtttatatactatagctgaagaattagtttacaagcagaaatacttgtaaaagctgcattttgtgtcctacaagtgaacccaaaggaagtgatattgccttcaagtaacagaacctctcgggcagattatcagagtaaaataaattcagatatgtatacccctcaacaagctatactttggtaagttatgttttgacagaatttgtttagtggacagaggtaggccatgttattgtcccacagggtaacctcaaatgaggtcattagccctggaagcagtgatttccaattagcccatatgtgatagagttgcaaactcttaccaaagactttattaatctctagataatttatcttctaatactttgtgcccttctttatttcttttttattgtagtggcattattcttgaacttatccattaagagttgtaactaggttccaatttgaagaagcccagatgaagcttcagattgtgtttgtatagaacaagttaagaactggcaatatgaataactaatatagataactcagacatttcagaactaatcatttgacctaaattaatttcttagatattggtcagattctctaggtgattttcagatatcccctccactttatggatatatgttgtaattaatcagtatacttactttttgctataatgtcctcctggctactcagaagaaaaccaagtaattgaagccttagtaaattaggagggtaacatggtaaaaacaaacagaagtcactggttcatagaaaaatcttgcctcataattgcattgtatatgaagatattttcctcttatacccataaacagtaatttaagttctgaaataaggaccttgtctttattcctagaacctcttccaatacctggcacatagtatgtattcaataaataattgttgaataaatgaactttattgtaaagaggatcactattatcctagatttggttatatattgggtcaaataaaatctcttcccttctcctctgcttccaaaagaaaatgtttaatatgatgcccccaacttacaaacaggttgtgtttcaaaattcagacagtttagttttctggaaccaagaaagcttcccttatttatacacttattgcaacaaataccaactgaaccctcactaccatccaggtatgttataggctcggagcatacaatagtgaataagacaccaagtccttgttcacatggactcgtacactttccctcctagaactagatctcttagaactgtgcctggcacaaggtgcacactcaataattgataactactatttttaaagaataaccctactattttcaaggatgtttattcgagttttgaactgagctatcaggtgacttcatatcccaaaacaaaatttgaatggaagcactaggttaaaaaaaaaaaaacagatgccattttaggtatgttcttatcctattttattaatcttccctgggcatccactttcaaaacagaggcatcttaccactttaaaaaaaattatttaccgtgtggccctggcaagtcatagccatgtgactctcacctaaaaataatgaagatatgataatattctaattcacaaagagaacacagcagaacttagtaaattaatgtttgcacagtgcttagaaatctgaggttgtaattgctaaaagaaatgtacagaactattattgctactaaaattatgatagacacttttttctaccaaaaaaatacctcagtgaattggtgtttatatttttaaagttgtatgccacattaaagaaaatgttctatgtgtatctaaaggaaaaacaaataagaatcatgtccctttgttattatgtgatataaaattgcaagggattcactattttggggaaagtaaatagtatttaagaccttatgattcaccagtttggacagatggatgattgcatcttcttacgtaagtgacaggtggcagctctagtgaaatggcttccaaagttcttctgatttttgcttctctttcttatctgttctttggcttggagcaaagtggcaatgcactccaattacaagagtaaggagagttttggagggctgaggtttcgtttttggggggtgtgtgtgtgtgtgtgtttgtgtgtgtgtgtgtgtgtgtggtgtgtgtcttgtcagcattttggttaactccatctattcagtaatctagctaaatggtgggtaataaatgccccacagcaacaggctgtgatttcaaaccaggtctgaacacattcttcctggaatagttattcttccacatagactttgttaattgtctagaatgtgaagggtcattgtaggtgataccttctcttatcagcagaaaataaggtgaggcttaaactgtacaacttaaaggagaataaatttttaaattttaagtattatttatttgacaaatatatagtgagcacctaccatatattaggcacagtactggacactagcaataaactaaggaataagacaaagtatttggttcaaagaagttaaattttattaggggagacagataataagcagtacataatttccggaaaaaaataaatactatgaaaaataataaagtgagataggtagagtaaagttggcaagctatttcagatgtgatggtcagtgtaagtctcctgaagaggtgacatttgaggagaaaccagaataaagagagaagcatgctaaaccctagaggaagagcattccagtcatgggtaacaaaaggtctaaaggccctgaggtgggacttagcttggtgtgtatcagcaaagaagtacttaatgagctttgaaagtctttacaatactgaaaagccagacatagagggttccattcaatctacacatacttgccttatacaacctgtagggttggaagacatgcttatgaggcgattcccagtttcagatcttaagatgtttttgtgatactcttgattttagtgaaaccataaaaaagagtaaaatgccttctgtcaagtagcacaggactatgtctattctgataaaacctgaactttagtccctgaagatgcttttgaaagagaatgccacaagacagttaaagcacaccagtaagatctccaggatgactgtgagggcaggaagtaaagtgaaagcacagcactgcaggtgctttattttcacctttcttccacttagaaagcaactcttctcacaattatcctatagtgcctcctaccctttggtttaactgaccatgtaagatgcattgagtatgagggctatctgttgtaatgacgtaatctctaatgttattctgcctatggaaatctctgattgttctggtaatgctgacacttcttacattatgacaaccattcttgaagagttttgtgaagattaaaaaaaattaagccacagtgtttgatatactagggattgccatctcccccatgaaggcctatagcaaatcattttgtaaaacacatattcagatcctaattttgttgtaatttcagaatttttttttttttgagacggagtcttgctctgttgtcaggctggagtgcagtggcacgatctcggctcactgcaacctccacctcccggtttcaagcgattcccctgcctcagcctcccgagtagctgggactacagtcacacgccaacaagcccggctaattttttgtattttagtagagatggggtttcaccctgttggccaggatggtcttgatctcctgacgtcgtgatccacccatcttggcctcccaaagtgctaggattacaggtgtgagccaccgcgcccggctgtaatttcagaattatagatattgaatgtccatagtgacaaacacctataaaaatagaaaactctccagtactgtttttggaacctgaaagattgggttagtcatttattctgttttgttgttcaaacattgttttaagcctcagatttcaacctatatatatagaatagcagagaggggatgaggtctattagtgacattgtagttgtaaaagtgcagtttgaacctttgctttatttatatacatactgtactgtcgtttgctctgtgcctttataaaagtaatcaaaaaaaagtatttcttcactagctattgcagtcttttataaaagactgcctttgcttagagcatgctatgtattgcagtgtggaatattggaggccattataagaatgtttggaaatagcttgacccctgaaagatatctataaactcaaaaaaaaaaaaaaacgccataagaagttatctaaatttccccctaagttagcatgatgaatagtaaaagcatgtggattctgaaacaaaaatattattttcttactcaaatttttgcacctcctccaccaaattgaaggaaggaaggaaagaagagagaaactaagggagagaagcacgagaaaagaaaaggaagaaggaaggaaggaagaaaggaaggagaagagagggagagaggaaaaaggaaagaagaaaggaaggaaggcaagaaggaaggaaggaaagaaggaaggaagaaaggaaggaaggaagaatggaaggaaggaggaaaagaaagaagaaaggaaggaaagaaggaaggaaggaggaaaggaaggaacgaaggaaggaaggaagaaaggtgggcaggcaggcagcagaagggagagaggaagaattctcttgtcatgtgaaatgctcttgtgaaatttttcaggcattttctgtttttttaaaaaatattttttttctcatcatacaaccttgaaagttgactggcttactgtcagatgcattaactaaatgcaatttctgtttttaataatgatagctcaaacttcatgtgagatcataccagccgtacaatgtaattcagtttatggttttcttatatacttcaaatacctgcaatatgtagttaatagtactttttttagataagtagtaggacatcacaacagtgatgttatggtgggctggtatatgtcagtaaagtagattccactaaaaaatggaaaatacaagatattttggtgtaatttgtctaaaaatattcatgacaaagaagtctcttttactttaatgtccaaagtgataagatgctgatgtgtctgaatgaaggaaaagggtgtgaagcaaagactgcactttctaagctgaagaatgtttctgcactgcacggggctcaaatacaactttatggtagggaatgtgcacttaagattagactagtagctcctaaagcaaatatgatgtccatgatttctttcaacatcacacacacacacacacacacacacacgaatacacgcacaagtagaaactgcaggtgcttcctttttattgcactatgtaaagagaaaatgtaaaatggacaagctttcgacaatcatgttctcttcatcaagctgttattgttattttagtgagtccactaaaaagaattatctagagcttcttgtttttacttctttgtgtagttgatgaatatgattaccatttttacctcctgtatttaaacccctctgccataatcccatattctgcctaaaagccatgtctgtgggagcttgttccctgcaatcgtttttagggatataactgcgtttaagcaggtgcagtaaatgcagttttggccatttttactgttgtatgcaagtgaaaaatgcctaatataattaagctgagattaatagagattattagtaaaaataagcttgttttatgaatgaagacctcacactaattcaacatggcctttctttgacaaatgcactgtattcacttatgtagcacaacattgtatgcctgaaaagtgaataaacatttacaaggctaccttccagaattttccattaatcgtcttctaattcttttcctgtggccagcaagaggaatccgattttatttttaagtggaacaaagggattggcctagcaccacaagggacactgattgtcagaagcacaagttatctttagttaattttgttactgaattgttcttggttctttttctcacttttagaattttaagcatcctattcaaaatggccaccatacaggggaggtgggagagaaggaaaataataaagaacagtggcaactgagttgattctgtataaataagcacatttgctgcatctctgttctgcagtttttatgtcccactgatgagagaactggtttgagatgtaaattgctttcctttgattgaaccagggaggagatgtcatgtaactcatctcatcagcatagagcattgtgtgcctttggtgaattataggataacggcgctagtaagaattccttaacctctctccgcagccctgttccagtgcttaataaccaccaaggggaagtacttccctacagttcacctgactaccttctgtggttttagcttatttattcatatcctgtccttaaatattttgtaaaggatcacgggaaagtgccagtgttttaccgtgccagatacaccctgcacattaaaatataaaattgcgaggagttttaatgtttgtttgttttaggtagagagcacttagaaggtggctttggaaagatgagaaaggtgatgaagacgtgatctcaaagcaatatttaccatttatctcacttgtcaagatttaggataaacctgtagaagcagctatgcatgaaaatggaggatggggtaggagtagaggtagaagtgggggtaagaactccctgtgatatccatgagattatgtgctgtatgagaaaagaatcaggaagtggaatgtgaaacaaaagaactggaaataggcctgcaatcaatctagcttggtatctcaacaaaccagtgacttttttttaatatgtaagaaattcagggcagatattacagccctatcatgacagcacggccttttcttcctcctcttctattaaatctacattttgaaggtggatggtgctgactcataaattaaattggagtaatacatacagtgtatatatatttctgtcactttgtctcaaattaaacacgaaccttctcccctgacaagatgatagaaaagttaattgctcgccctggctttaaattggaatttgaatttgcaaaatgctaaaggtttatgagatctaaatcatgaggagcttaaattacattcctgtgataaaatattaataaatcaattaaaacataagccgagtataatattactttttttttgtaagaaccttgaacacaataattcattagggtgtagtgcagtaacaattattgtatctttttttaattttctttttattagttttttttgataaatacatcatcagataacattccacatggtggattatcattaccccaatgcagcttccagaaattctgttgtacccctaaacaagagctcacaggctgaattgtctgctcttatttatccttgttagcatcagctgcttcttttactgaaggggtatttgcctcttgggaacatctgttcaatgccaactctgccattttgtggtttctgaatctctcttccaaaaatgggcataatcataataatactacctcagaactggcatgaagatcaaattagataatgtatgtggaaatcatttgtaggtggtaaaggaccatcaaatgttaattattattatcatagattggggaattttttatctctagaagggctcttagacgtcacttagtaatcaaccccctcattttaaatctgaaggatcagagaggtccagagaggttaagccacttgtctaataccacacagccagaaagtgaaactgctgaaactgaaattaagacttgtaaatcccacctcagggtgtttttcactctctataccctaacgcctccctaaaataatgctaggaaggtcacgttaagtttgggttatttactctcgccacataactttcgctttgaagctgctatttttctgttgttgttgttgttttgactgactaaacattagttattttagggataattttctaaggggcctggtggcacaaacacatatccccacagctgtcaggaaaggttcatttggctaaggaggcactgccttctcctgctgctccccaaatgaagactcagcagtgtatcttcctctcctacagggttctggaggaagcctcagatgaggagaggtagtagctttcctttttaaatacttctgtcatgtaatgatggatgaggattcacccaccacgaattttatctcctttacctccttcttgctctctggccctagtttttggtttaccttcccctttctcccaagttccaggaatcactcggacattttatttattttgaacataaagagaaccatctccataataccttttccagaaaataataattggaaatgaatagatgtttcttcctttcatgctaggaaaacactagctcaacagactatcagcagatcagagaataagagactgtgtgctaatcctgtttttcctggtaacatgggatatatctgacaagttttcatcattctgtctttgttttcccttcccaacaatagaaataacaaaatcaatctatactagtagtttgaagacctccattaaataattacgaaaggttcacaaatgataaagagttatacaaatgctatataatagtaatctgtgatcttctaggaataagctaaggcagagtggataagttctatgagatctataacatttacatacttataacacacacataattattgattgatagtgatgtggtttttacagaatattcgatgcattatggccaaagaagatatggtctctgtcgtaaagatttaagattaggataaattattttacaagagaaaacagaagaagtttagacaaaaggaagctgattgaagcagagaaactattggaactataagattagtcaaggaaattaacaaaaagtagattttaaggaagctagagtctttggtgacatttagaaaaaaagtgaaatgattcattgaataaaataattactgatcagagtgcagcaatgtatccattgtcaaatgtcataaagcttcaattaaaaacacagaaataagcaaaatatacttttaagaaggcaaatgagatttgatgaaatccaagaacttcacatattagatagccctgcagggtatcagtgattaaattcattttatggataaggaaacagattcagggacgttaagtgatgagcacaaaaacacagtcaggattcaaaccaggtctgtctgactccaaagctgctttctcttttcattaccctatgcaatcttttgcagccaatttaaagccacagaaaacataccaaagaaacaaagacaaaaactatacaaatgtactggagaagaggaggcgggaaaacagaaagtgttttttctagaggcagactcactgatggcaatgagaactgaaatagaagtgagtaccttggctaaacaactaggaaaaaacacacaaaagaatcatgaaagtatttatataacttccctgttagcctctattatctttgatagtagtgtaatattttatttggattatcttttattattaaggctcttatcattttctagttgttagtatacaaagtattttgacacatattatgtcattttccactcacagaaaacttatattgcaagaaaggaagtattgctattcctgttttacagatgggagaactgaggcttgggtgggctaaatgatgtgtcaaaactttattaataataagtaacagaaagaacttaagaatctggaactactcactccagtacatttctaccatatcaagtcacttatttgtttcagaaaataggaactcattgtaaagattttcatcttaaagtttaaaagaaaactgcttaaacaggtaactagaaaatttacttacaacaaatgcctcattttcctattactcttctattatagaaaacaatgaagcattgcagaagctaattttaaagattaaagcaactcacacataactttgctactcacatgaggtcattttacagatactaattggggtcctctaacttcttttccacatataccatgttatttgtcattctacaatcaaagttttaatttataacttcatctggtagtctaaagtttagtttagatttttaaaatctcctatttaaatgcaaatatgcttatgaggggaaatataaatggtcaatgaatgtgaatgctgtagttgacaccttacaacaggacaccttacaagggattagtccaggggtttaaggacaaggacgggcaagcacttgattgagagaaggattggagaggagctaataagtgaagttttgtttttgccatttaggaggccacagatgaaaaactaaatgcaacactgtcgcatatgttgctgtgcaacaaacaattaaatagaaaatgagatgcatataaaaaagccttttcttacagaaggcaggtacactctcaaatcagaaaccatgggatatttcgaaatttagaacagggacaatgtcgagagtattttaaatataggcagcaggtagaacatccaaaagttgatggacacatgctccagttacttacatgcaacaggaaagtgtgaggctataggtggtctgcagaagggttgctaaggcttgttctacaacagatgataacagaggaggtggcagtgaatgaggaatgacaccagcctgccacatgtgccaaaagcaggatgcatgggtggcaaggtggagaagataaaccacaccagcctttgccactgttgatcaccttcaggagaagagaaataaggaaatattagatcatgacttggaaaatgtatcaggcaggactttgtgcaagccctttggaactcccgctaatctaaatggggaagacaagacactgagaacactaagcagatccatatctcttgaacaatgtgcacggtcgagttggtgagaaaggtaaaacataacaggaaatatggtaccaaaaagaaactccctgaagtcctcagtttactgtgccagcctctttcctgcagcaaacagctgatagaattaactcagtgaaaaatgaaaactaatcagaaaggaacctgcattggacccagatttagctatcagctaagcaaagctaatagctttaaacaaaaacaaaagcaatacaaagaaaccagatcaaaacatataccacaagaagaattatacaagaaaataatatctattttccatactagcaaataaatagaagacattgtggcctccttaaaataaaaggtcaaggccaggtacggtgtggctcacacctgtaatctcagcagtttgggaggctgcggcgggtggatcagctgaggtcgggagtttgagaccagcctggccagcatggtgaaaccccctctctactaaaaatacaaaaattagccgggcatggtggtgggcgcctgtaatcccagccactcggtagactgaggcaggagaatcacttgaagctgggaggtggaggttgcagtgagccgagattgtaccactgcactccagctagggcaacagagcaagactctgtctcaaaaaataaaataaataaaataaaataaaataaaatgaaagttcaaaaactagataaacaggattgaataagtgataagacaaataaggagaaataaaattgtctgtgagagaacaagaaggaagtagaagaagaaaataaaactctaatgggaccaaaaaccatataggaagcaaaaagctgggagaggaaggagaagaacttctactgatattaccacaattgtgaataagaaaaatcaagcaaataaaaatttaaaaaacagtttttacatgatatgaaaaagtgatcattttgattggcaactcgtatctcagacaaaaatagtatctccaaaaaataagagctcctgcgaattgataagaaaaaagaccaataactttttaaaattaattttttgcttaagaggcattacagaatttacagaaaataagtatgtatagatatagataaaacagtgttcggaggaatatccatatctttaaacatgactattacaggaaagaaaataattataaacgtattaccattcatctcatgaagttggttaaaagaacaaaaaacaaatctgcaaagtagaaacaaggaattgattaaaaaaataaagtcagaagttaaggaattagaaaataaaaaagagacacactaataaatcaaagagttggttttttcaaagagaataacagaacaataaacaaaccaatatcacatgatttaattactaaatgagaaatcccacaaatgcacaaaattggaaatacaatggggaaataaccagagaaatggaggaaattaaaatgattataatgaatactttatatatatatgtgaaaaatttgaacataagggataaattttaagtaaatataaattacaggaaaagactcaagagaaatacaaaagaaattcagaaagtttctgggctaccactaaaataaataaattgtgtgtatgtgtgtatacctgtgtgtgtatctactaaatgaataaatcagtcaactttgtaaagagacaattttatttcttcttacctcttaaatgtgttaccaacttttttccattagcattgaatagtcaagaaaacatcacactagatttctgttttttcttgcatgagtagatgtcttgtctcattgatttgctttactgagtcatgtggagccaagtagagaaacaggctgactcggcatccctcacacagatttcttctggctttaagggagccacctaagagagtttgggtagacaggataatgaaaacagccctggtttctgggcttggttctttttatattgcttccttaaaatatgcagcatttacagccattgctttgtggctttattttttttaatctctcaactgagacatttagactagatgagtggctcatttcttttcccagaaaagtgtgcctatccacaaaattttgaggctacacagtcttcccaaacatcctctctccacctggagctttaggccatgggttagatcattttaaattacttcagctctaacattctacagcctcagggaatatacagttttaaattgaacacaagcctcagaaagagtgatcgttattatgagaagcagaacacagtgattacactttgactctggagccagaccaccttagttcaaattttagcccctttatttacataatgcagggccttgggcaagttacttaaccactctgtgctttagtttcctcgtctgtaaaatggagaaaataatagtaatcactgtaaatagtagtcactaaaaaataaaggttgttatgaaggttaaatgggtgtatacatattaagctcttacagcatacctcttaatgaatgtgagggattactatgtttcttactagttaagatgaagtatctcagcacagagatgaacacaccacctatctcgctatgaacacaccatctactccctatgaaaaatcctgtttatattttggtcgtggctgaaatatcaactttttccatgtgaacctgtaatcgggtccattattctgccataaagtagtagttatgagtgttgctatatacaggatgttttgggaaagatttcctgattttggccgggcgcagtggctcacacctgtaatcccagcactttgggaggctgaggcaggcggatcactcgaggtcaggaattcaacaccagcctggccaacatggtgaaacctcgtctctactaaaaatacaaaaattagccaggcgtggtggcgggcacctgtagtcccagctactcaggaggctgaggcaggaaaacagcttgaatccaggaggtggaggttgcagtgagccgagattgcgccattgcactccaacctgggcagcagagcaagactccatctcaaaaaaaaaaaaaaaaaaaagatttcctgattctattgccttaatttggggctgttattaagaatctcttatcagatcctcagtagaggagatgattaaattaaaccaggggttaacttgatccaagctaggcaattattttttcatattttccttgtttttgtaaagtctttttgctatgcatgtgtatataatctgtgacctagggacaactactttctttgaaaaccataataacatgataagtataaaattatgtatttacttaacaatacaaagcatatatcattttccttgagtggcaaagttgaggaattaattaaaaacaaatagtagtttgataatttagtgtataaatatcaactgtcaattagaaaacaaaacacaaaacaatcactgcatacagtttcaggtaagacttatagtttgctatgcctttattctcattggtagaaagcattttaatgatttactcatggtcacagaggaagtgtatccaagttacaattaaatttcaaaatattgaactagcttatatagagccaattttatcttgaatttaaaaacagttgtatagaatagagtcacataaagtatcaaagattgccttggttgtatatggaagataaaagccaggttcttacgcttaaaagaaatgttgatttatgttgaatttcaaaagaaatgattagattatccctgttgcctagttagcacaattgtctcagtgctctgaccttggtttgttaaaaaaaagaaaaaagaaaagaaaacagtgctttcctagggaaccagggactctctcaatacttaccatgtttatatttttacatgaaatttaatattttgaaaatgtatgaacccaacatgactactctgtctacaggttttatgttggactgttgccatctgtggttgtgaagccaagtgttctgctggggcagaataatcaaatcaaagttaatggggtgaccatctaagcagggctctttgtcattaaggtccactcttgtgatagtagcacattatcctgctgattggatttgtaggaaggcatccacctgtggcccacattggcagagaggagacttactgcagaggcagccctggcgaaggagaagcaggaggtagccgccctgggcagcagattcttttgctgaaaagccaaagcgtgcaggacagcataagcaatattagtagatgggtgattgacatagtatttggttgatttaggtcccaaagtaaagtaaccaaaggcagaggattagaaactgtatcattagagaggaatgacttgtcttgagcagggaaaaaacaactacatgtagagacactgagccagctgatcagacaaaatttaagcacgtggggccctttacctccatctcaggagtgatttttctctgtttggacgagagctattgtaagaatttccatgtctgttgggggcacagaggttctcacagactatggtaaacatgatttggctcacacgctctcataatcaggctgacttgcactgaaacagagagtgctctatagcggtgccaggcctctagcagtaccaactgttaaataataaacaggccctgtttgttggcagcctcttcccctcctgccaacatggagtgcccattttctgggtttacctgcccgcatgtgttcagacactcagaacagtgtgtgtgttgtgtgagttggtggtggcatggaggcatcagtctacatctaatctgcttagtttattattctctcaggacctcgggtgagctagcaaacacgcggggctctggcagcacgaacaatggctatgctgtcattctagataatattacaggctttgcagagtgcatcagctaattgtttttcttatgttcatttttgtttcttcaaattctctctcttcctttgagctggtttgtaggaagtggggattaggaggcataagagtggttctgtcaattagatgcattacttcctgaaagctagaaagtatttgggttgttggattttaatgcagtatgtatatagttaattcacattgatagtgagccacgcattcagtcaatcaacaagtgcttactgaaggcccacagggtgcaaagaaccctggactaagtgcttaaacttgactccatgtgccttactgtgttattgcacaagtgctggagtaaggttggagttttcccagattccaggtacccaatgactacagtagattatgaaagagcagttcaggtgagagccaagctagaaacacacacatgcaaacctcagaaaaaaaaggattcccaaaagtcctctattttgtcatggagacttttttctccatttcactggtcccacgaaaaggcccttgataatctgagttttatattgcatttttggccaaaggaatttcatatgtttcacagatgaaataattaaaaatagactctcttaattcctataaaccctcttcatcccccaccctcccagtaaagcccaggataaataggccgtgttaccatttccaggaggcttttggttgatcagtgtaaatgaggcatattcaaagttggtgatcagggatatgtagtgttaggtggggagggtaactatgaagcatgtagtgtttctttttttttttttctcatgaaccaattctaaaggtaaggtcccaaatctgaagtaatgacggtatccctggagtgactttcttccaaggtgaccattgtgaaaaatagcccttgtgagaagcctatagatttgtttaaaaaattagtccgattcctttataatcatggctcacacatgatgaagctattaattggttgtggtactaaaaccatttgcttgagtgaaatgaaacttctcctctctcagatcactaaatatactttaactgtggagtaatcattccgtttcttggactaagatatttttagatcaagagtaaatatttgaagtaagaactctggtgacagcgctgggagtgtttcagaaagttaggatggtaatctcatattcagtctaattttccctgaattcatgcctcaacagtgtgtaatgaatacacttatggtggagtcattttccttttatgagaaatgcaaggccccatcttcttattatcttttaagaaagatttctctggtttatagtgtcagaagtggttttaaaaatccaggcagtattgaattcacacagaatggttcagaaaagcctggtagtaaaattcatagagaaacaattgtttaaaatgcaactagcattgtatagcaaaataatgaatttgtattctctactagtctcctgttggatccatatcctcttgtcattgagttctcaaaggtttcatccaaaagaactaggctcagattgattacccttcatccaagcaattttgcctgtttgcactaggcctcctcctaactagcaggtctcagtgccctcaccaggacactccccagattggctctaggagagctctcatttctccctgtgtcaggctgcttgcagctagcatcaaacacaagctcacctatgctctcgagttttcagcatttagtctgttgtggatggaaaagtagatatcaaactctttagaattgtatctaaaaagaataaagagcctttgagtgagggcctgaggagcaagctctctgaggaggaaagctcatcagtatggtgaattctctcagctgcttgaccgctttgtcttcagtgttccagtgaattgcattttgatttcatacacatgcatacaaacacacagacacacacattatataggtatatgtaggtgtgtatacaaccctattatactctctataatgtgtatgtctctaacatacatatctcttgtgtgtttatctaaccacctatctatatctctggtaattgtcattgttcccagtgatttagacattaaaatctatgaaaataagcagcatcttttgagtacctatttaagcacccacatacctggaagtcctcaaggtgcttataaatttccactagactcttaattcatatggtcaagacaagtgcagttgagcaccaatgtagcatattaccttattactcattaaaaaatcactgcccaatttagtgtttcgcataatataagaatgtatttgttgtatataatagaaaatatgtatataattacaattgacattggttgttggtaaaatgggattgctggaatagcgcttaaacaaaacaaatagtactgacctattagaaaaattaattatgaaagaaaagtaatggattatagttgcagataatggttttggggacactgctggttgaaattcatcctgaggcttatttacaattggcacaattagagcttttgagaattcagcagccttgatttatttgcaggggttcatatagcacttgagtcacgggcgaggtgaggcacagaggtgggtaggggacttactgctttacatttaagttctatggaatttcacatttctattttggggaagaaaggattgtctctagagagagagcatcaggttctttaacaagatttaataaatttgggtccttgtatcgatcaaacttcatactagatcagataacaaaaaattgaatatggctttgcactagaggctattttattttctgtgctgccaatgaactaagtttctataattttgctttcactatttgaaattttaatttatccatcagatgtttattgatacctaatgtgtattcagtactttactagccacttgggatccatcagtgaaaagataagtaactcatgtagtatgttaggagatgattagtgcacaattcatttatgaatgacccataaaagaataagttgataaattagatttcatgaaaattaaaaaattctgcactttgaaaacattattaagaaaatgaaaaggtaagccacagactgtaagaaaatatttgcaaagaatatatctgataaagaacttatatccagaaaatacaaagaacttcgaaaactcaataatatacaacatattatttaaatgggcaaagatttgatcaggcacttcaccaaaaaaaaaaaaaaaagaaaaagaaaaagatggtatatgatgagcacatgaaatgatgctcaatatcaatcattgttagaagaaggcaaattaaaatcatgagacactattacacatcctttagaatgactgacatttaaaagactgagcatagcaagatttttgaggatatggagaaactggaagcctcataagttgctggcagtaaagtaaaatggtacagccactttagagacagtctgacagtttttaaaaagttaaatgtatgtttaccatgttatccagccatttcatgcctacatgtttacacaagagaaatgaaagttttttttttttttttttttttttttttttttgagacagggacttgctctgtcaaccagcctggagtgcagtggcatgatcatagctcactgtaacctcaaactcctgggctcaagtgatcctcctgcctcagccttcccagtagctgggactgtaggtatgcaccaccactctcagctaatatatatatatatatatatatatatatatatatatatatatttactccagtaattttcttatgcaaccatagatctattttccatcactacacagtagcttacatttcctagaattttataaaaatttgaattctattataaaaatagaatcttctgtacttgttttgtccttctttcactcagtatattgactttgagatccatttatgtcatagcatgtatcaataattcaccatttttttcgctgcatagtattccactgtatagacatactataatttgtttatccattcacttaaggatgggcatttagactgtttacaatttttagcaatacaaataaagtagcaatgagcatctgtgcacaagtctttataaaaatatggccatgtgcggtggctcacgcctgtaatcccagcactttgggaggccaaggggggtggatcacctgaggttaggagttcaagaccagcctggctaacacggtgaaaccttgtctctactcaaaatacaaaaaaaaaaaaaaattagccgggtgtgatggcaggcacctgtagtcccagatactcaggaggctgaggcaggagaatcacttgaacctgggaggcagaggttgcagtgagccaagattgtgccactacactccagcctgggcgacagagtgagactccgtctcaaaaaaatatatatatatatatgcttggctggccatgggggcttatgcctgtaatcccagagctttaggaggctgaggtgggaggatcacttgaggccaggaatttgaggccaacctgggcaacatagtgaaacaccatctgtaaaatatatgtatacgtgtatatatattcaaggtagaataaatagatgctttggagccaactgaccagaatgaagacctagctccccatttactggcttgaaatcttgggcagatttgcgtaatttttcagatgatttttctctactgtataatggagataatataacttagagtcctgaaaaataaataagacaaggtacttatagttctttccttgccttcaaatctggactcagggggagatagattaagggcctgcctacatggtatgagttgagataggtgagagtaatgttttctcttatacttggatagtacttgtattagtctattttgacactgctataaagaactacctgagactgggcaatttataaagaaaagaggcttaattgactcacagttctgcacagctggggaggcctcaggaaacttataatcatggcagaaggtgaaggggaagcaaggcacgtcttacatggcggcagaaggacagaaaaagagagagaagagagagactgccaaataactttaaaagcatcaaatcttatgagacctcacttactatcacagaagagcatggggaaaatcgccccccttgctccaatcaccttccaccaggtccctgggattacaattcaaggtaagatttggttggggacacagagccaaaccatatcagtactagtgcaggaattccacagtttgaggagattcattctttttggatcaaatgttgcaaattctgggatttcttttttgaaaaatacaagaggatggcacactaacctatacgtttccattacaattttctaaattcgttggttgaatcagttttcctccttgcaacagtggccaagacagtcaacttcaaccattttttagatcttagttgaaatattacttattctaagaagtgttccttaacctcttcagtgtaggttaggtatgcccttggtgtctcctggttctacactcctctttcttaacttttagtgcattggttcttatgtctgccattttactactgtgtaagctccgtgaaggtagagacttggtgtggcttgttaatttccatatccacaaattatcttaataactaattattgagtaaatgaacaaaagtttttaaagaaggggtaaggtagagatgagggaggttggaagctctaagaaacagttctgccactctcgagttttgcctcaggttagcccttctgtcctttcatcagttccagatggagaaaatttttaatataatataatgcaaaaaaacttcacccctctaaaatgacacctaggcaacagtccaggctaacaacaaagaagaagctataaggagctaatccttgggagtagagtaatggcatggaaagaaaactaatctggaaataaagagatccatgacctcaagcctaacctcttgaaacctagattatttttatcttcaagaagtcctgttgcccaccctgcttatcttataattttgtttgagagtcaaaagagagaagagaagtgtgagccctgaattgctgtagaaagtgagaacttactatgaagggggttgtataaagtctcattagaggcagccttgctagtcttacttaacctttgcagtactaaagttgatgttctctgaactctctcttaggctctctcctcacattgggcagtcctcccaggcaatctcattttctcccataggtttcattagcatctgcatctgaatgaccaccacatatttctccagctcaggcttctctctgagcactgccttctagacctcttctcttggatgactcacagacacctcatactcaacatgttctaaactcacctctttgccccaaacatgctctcacctccagtattgctacataattgccgacattagaaacttgacattaccttttccatatcctgtactgttccacatgcagtcaatcacctggtacttttgatcttcctcctaagaatgtccttaatctgttcaatcttcttcatatcagaactactactctcatccagggtaccatcttatctcacctaagttattgcaacagtattctgacttccttaatattaatcttccagcctggctcctgtctcattttctagactgattcatgcccctttccccctagcattctatgctctagtcatactaaacgtgttttcatgccttcggtgcaccatgctcactctcatttctggtctttgcatatgttctactctttgttttgaatactcttcattactcttttcttcccccatgtgctcacctccactgacataaaaccaatcttgcaagtctcaatttaaagcttattttctatggaatgccttccccgattccctaattataattgccttacattgcattcctgtaatgtgcactttattatcattgattgttttgcctaaattatccttaaggtagggagtagtatgtcttattcaaggctgcgtctttagtgcctaacacaatgcctgacatttactaggcatttaataatgcttgttgagtgaatgaataaaaaataaattacaatagctacaaatgatattatagctaatttattacatattttactttttaaaatttttaatttttttcaaaagtttgttgctagaaaagtaagaaagatcggttcttgaaaatttattttactttcatttatgcattttgaatagctctcactagagcctcaatttagtattaaggagttattccagaataagagatacctaaactgcatgattcctatattcttcctctataaaattattgtgagaactacttttttttgtctgttttaatgtcagggataggaaggtatcaatggtgggtatgaatttgactactctgtcctagaaattattatgcccttgtcaattttctgagactaacatttaggagaattctgtgatcacaattttgactctatatctgacttaagctcaagctagacgcaaacattttctactaatactctggctttttcattatttctctattagaaactatggaagatattacagatgagacagtaaaagaacagactgaatatggttccactgacaaccaggaaagttatttgaaatgacatgaatagtcaggttgtaataaaggtttgttaaaacatttggtattgtacaactagtttccacattaatcaatcccatatgttctaattaataccttgctaaaatgtatgttgattttcaaggaaaacaacagtttttaacgtctgtagacatgttgcacatgcgtgaatttatcattaacaggttaattgagtactgaattgagcagaaataacatatcacacagcgaccctgcaagggaaacttaccatcattttactaaagaagaacctgaagatagagatataaagtaacttgttcaaagacacacaattagtatagagaaaccccaggtctaaacctaaatctgtctcactcaaaatgtttttttttactacattgcattacctctctggaaaacataattacttgttctgggtgtattaatttactagggttgccattagaaattagcacaaacttgatggcctaaaacagcttaaatttagtctttcccagaattggaagccagaagtctgaaatcaaggtgttggcagggctacactttctcagaagactctaagtgagggggaatcattccttgcttttccagcttctggtggctccagaggttccttggcttgtggctatgtaactccagtttgtgcctctgtcttcacatggccttctgctctctctgtcttctcttttttctcttataagaaaatgttattggatttacggcttccctgggcaatccaggattacctcatctagaaatccttaacctcattacatctgcacagatcctttttccaaataaggtcacattctcaggtttcaggggttagaatgtgggcgtttcttttggaaggtcaccattagatccaccacactggatattgcagaaattgttttgagagattcctctattatagatatatctgagatttcctttctttctctctccctttctttctctttctttctctctctctttctttctttctttctttctttctttctttctttctttctttctttctttctttctttcagacaggctctcactctgtcacccaggctgcagggtggagtgcagtggtgtgatctcagcttgctgcagccttgacctcctgcacgcaagtgatcctcccacttcagcctcccaagtagctgggaccataggcgcacaccaacacaccaagcacagttttgtattttttgtcgaaatggggttttggcacattgccaaagctggtcttgaactcttgagctcaaacaatctgcccactttggcctcccaaagtgctgggattataggcatgagacagcgaggcaagcctatctttgaactatttaatggtcaaagttttgctaatgtatatacagggaggaaaatggctggttcatgctgattctccatcagggctatcagtaaaagagtgagtgacactgtaattaatagaacaggaatgataacatcttataggggtgctgttcctgcttttggaatggcttctttaaatgtgggatgcatctaccccatttggttgtaaatggaaacatcagtaaataagtttaaagacatccttgtttgcctctctgatggcaaactccaatccatacatccactacagtctattttggtatatcttctatgaatttctccaacttcttacttaagttttgctaccttccaaggcaggcattaaaaaaaaatatggaatagtgctttattacctgaccctatttgtacttttctgaatatgaagtttgacctctagtattactattctaggatttcatgaataattctatgactaccctctgcctaaatttcataaccccattacatattagatcagggttcagtgccctgtcttcttttaacttttcagagactttccccccccagtcacaccatggatcttcaattccagggctctacacatctctctccctttaggccctcatgattgtggagattgcaaatgcatcattatgtccattcgaagatgtcaaaactttacataaatatatggaaagctttctagcctattttcagtacacttgatgagttccaaaattttattagtctttttggttacagtctcatatttaagctaatataattaggaaacaattgaaagtggttcttaaattcttttttgagttaaacctgatgtatcaaataccatcattgtaaaaacatgatttgtgttattttccctaaaaatgcttcccttgcatttatacttattaagaatagataatagctaacatctatccactgcctttgattcatgaggccctcacgaattgcctcattaggtctccgacagtatggtacaactactctttatattttacagatgaagaaactgaggctgtactgctactttctgcttacacatcctaatgaaaccttcctactggggtgatctcttttggtttgaatgtcactacttgagtgagattttattcactactttttcttgatcattggcaaaatgtccaatggaactaattcatgagagagtcattttttaaattaatttgtttactgaaagtccgaaatttttctgaacactaagaatgtactggtaagcaattataataggcagcttctaagatggccccacctgatctccacatcctctattttcacctgcttgtctaatttcctctcctttagtattggctggacttagtgactcatttttaataaaggacagaagtgataggatgtcacttccaaggttaagtttttaaaaagcttgtggtttttctcttgagtccctctatcactctctcccggattgctctccctgagaaaaagcaaagtccaagtcatgaagtagccctgtgtgaagacccctgtgtgaagaccttcacatgtgaagacccccacatggcaagtctcctcctcttcagtcgagaattcagatgaaaccacagctctagctgacagtttgatcacaacctcatgagaaactttgacccataggcacctacctatactgagcccagattcctgacccacagaaactgtggaatggtgtttgcttttttaagttactaagtttgggggtaagttgttatgctgtaatagataactaacacatccaagaacctcatcctcatggaatttatactgtaatagagattatgaacatacaggtacatgtgcatactcacatacatacaggatgtaaataaggaagatactagtaattagttctaagagaaaagtaaagcagggtagaatgaattggggatgctttggctatcttggccacacaaggaaagacctttctgtggagataatatttgagctacgagtgaagaaatcagtcatgcagagatgtaggaacagagcagtctgggcagaggcaatatagctagaccagggctaataggaataagattggcttgttttagagacagaataggcaaagaagcacggtgaacaaaggaaaaatgttagaagatgagaacagaaagatggtcatgaacagataatggagagacttactggtcatggttttgaattttaatttcttcttattgcactatatataacttgtagaattttaccaaaggaatgatatcatctttcctgcatttcaagaattctagcttctgtttagataatggattataaggtgcaacagtggaagcagagaaatcagttaggagaccagataagagataattgtgatttttgttcgtgatagcagagatagtgaggaatggtcgggtttgggatgtacttttgtgtttgggttaatgcggcttattgatggattagatgtggtgggtgaggcaaaaagagttgctgatgtttggcctgatcaactgtcagggcagatggtggcacctttcactgagacgagagaagtacagttagattagaggaggaagtggcaacatggataatagggaaaccagagttctgtttggggcataaattagtttacagtatgtagaactaacaagaaaagtgctcattattgctattctatgttttaagccagttcttgctttggaaaaccatttccaacatcttgtagcatcttgtttccatatacttccattttttaaaatctttgtggtggaattttttcagaggctatttgagaatttgtaagtaatatatactgactcccacttttcaatatagcaagttaatcagacaaaatatctcttatagaatgctagaaaatccactgaggaaaaagtcagtgtagtattttgattataatttattaaaacacacatatcaaatacaagataacctttggcctttccttgagtcagactttgttatagcttctaatcatgtcttgccctattcattagcagctcattcatttcccttatgccacctcactcaccttaaaatttaagttttagcagctttgctgtaagtcttataagtgcagtggggcatttgaatggatcgttgtttcccttcttctagaaactctgcagtgagaataagtagtaagaataattgtggctacataggtgcatttgttccctaagacaaagtgatcagagaactccaggggaaatgctattaataccaatattgttttgtaatgaaagggttaacagctgtcaaactcaatgtcttaaagatttacaaaaaaagaaaaaaaatgtcatctaggctgggcaaacatcagtgcctggcatgaggaattagcaaaaaggtctttaggtatctatggactaccaaatatgcatgattctctagtccactagaaaatttagaactgattctcaaatactaaaatatgaaactgaggggcttatacttgatctgctaattctgaaccaatgtattgcaactactgtgcattttgagatactattatgaactggcgtattataaaattaaattgtattgtatagttcattgtattgttccatcagattttgatatcctcactttaaataattcatgggaagaaatgatcacttcataatgccacaaactcacagcaggcaaaactaattttacacaatatgaaaacagattttatttatttaaaaggaatattaaaaaaacaacttttttgacaccagctgctgggaaataaatagaatactttatgacaaaaaaaaatccaaatctataaaagctcttcctgggagatcaagttgagaattgtaaagatacatttaaattccctagtcaatgctataagccttattttgagggaaaaagaactctcccatctgcttactctgtggggataaagcgatactgggagaaaattgactttacaaaagccctcctgaaacctttagcaagctttaggtgtcacttcagagaccccctattagtataaataacatcagtgggtaaacagtagctggtgtccttaaatacaaagtagaaattattgtttagctttgtcctaaccagaccttgattagaagtgggaaagagtattttggggtgaccacaacaactttcctttcactgtggctttaagaatggaatgagaaaatacggtgaaaatataatgaaactgttttctttgggagagtttattagatgaatattttaatacaaatataacatattttaataccaaagataaaaaaaatccaggctttcttttcaatgtgataacgactccatatctaactcaatcagacacttgcttcagacaaagaacgggactcttgccatgggcgggtctgggtttaatctcaggagcgtgagggtccaggcatccagacagtttgcagccctcttccctgaggcttcagggagagagagaacaagggtggaaaggtgcaaggattggagcaaaggagctaagaggtggatggaaaagagaaaaaagaacagcctaaaataaaatattttagcaccaaagcaatgaaaatacattctgtggataatgtaaatgctatttattgaatttttacttttcaaaaatgtttaacttaaaaattcttgctgacagtgggaatgtaaatctaagactaagagacgaacttaccagaagaagtttattattgtctgataacagctgaattccggtcttctttgggtactgtaaaatggggcagatttgtatatctgtgatgtcataggcactgttggaagggcttgtctctggttttgtcataagtttcctacttgagcagttataagccatgaattagaaattcattttagattttgaagagttacaaatttggaaggatctaagttaggctctattattctttaactttttaagatataaaatattaatacagtgtagcagagatttaaaatttttaataggtattaccaaactgcttcatagcattggtcttttcagtagctatttgtattttctaaggcaatagcaatatacacagaaaatgggttttctttgtccttactatatcagtgcaatctaatacgtacattagttagtgagattgctttgggaaaaatagaaagaacattgagattctaaaacaggatgtctatgttcaaagtctggctgaatttcacttactacttgttgaacttgtacaacttattttaacctttccttgccttatttttaaaattttgcaaaatggtgttaatattacctatctataagaccctcggccaggtgcagtggcttatgcctgtaatcacagtacttgggagaccaaggagaggattgcttgagctcagaagtttaagaccagtctgacaacatagtgagaacctgtatctcaaaaaaaaaaaaaaaaaaaaattagctaggtgtagtggtatgcatctgtggtcccagctactcagaaggctggggcaggaggattacttgagtccaggaggtagagactgtagtgtaccaagatcacaccattgcactccagcctaggtgatagagtgaaaccatatctaaaaaaaaataaacaataaaaaaaattctcttgttactcactgaaataatggaagagtttctgggataagcttagagagccataaaaatgttgatttaatcctattaataaatagtatataagttatgttcttcaaaggcatttgtattttaaagtatttaaagtgttgcagttgtattgttgcattttaagggatgactgtacagatgctatgtaatatgtgtaaaagttactctctttcttctgagtgttttgctgtaatacaaccagagttataatgcaaacatttaccaaaacaacgctggtatagcaatgttagtattcggcaacctgagttgtactgtaataacttttcaataaatcaaaatatgtgaaccagactattttcttatgtatagaagagatatgttattttagaatcctatttaaaatataagaaatgaatcaaaaacttccaaaattttaatttctttgatttttctaggatttctaccttctagaatataaagctcttattctttttactgaaatcttagctttacttcagcatcaagctgcttcataatgcaagggctaacagttaaaatgagagttaaatatcatttaaagagaattatttaacggccgtgttactgttatgaaattgtacatgttccaaaataagtctagtcaccttcacacctacttagactgattccataagtcaatcaccaaacacaaaattttggcctaaaatattcgttaatatttatgtactaacaggaatgttcacgtctaagcgggagaagccaggttcactcaattcacaaatttagtatctaagatttgaaatatcatagctttttgtgcatttaaaaaaattagacttacatattgactttgagcctagagaattttagaaatagaaaatataacgtttcatagcttttagatttacaaggacatcatttttatttatagaataatgcattgtgcttaattacaaaatatcaaagtttttgtcattagtgaatttagagtggctgtccccttgttcccttgtggaatttactttgttagaatagattgccacattctttgaagacaattgccttgatactgataccagtcaccatgccttcactagatctggggatggacaataaagtatatgaggagtactggcatactaagtcataataaaattagctaaatgttctatatatcaaagaatgaggtgattttggtaggtaaaaggtagtccaacctgcacttctgttgaaaaaaaatgactgttgtatcaacctggtattccatccaaacctgaatttgagtttatccaaagagctgcactgaaattcagcaagatagcatggactgggccaggtgttgcaggcagaggacaggattttactggcttggcagagtaggactttaggttatttcctccaaagtgacattaaattcctctctgtgctatcacaacaccttttgttttttcagacctgtctatagactctcagaggcttattctgtttcgtgaaaacaatgcagataagctgattgaaatgtcaacagatataaacatgcagataaaatgttagtatgtaatggtagttttcaaacataatgagtaatgaaatttaagcagggtccaggtggaataggatcctagaatcctagaataaaaacatatcattttagaggcagaggtacagtcccattcctctgtttaaaaagatgaggtagataaagtccaagatctttcatctggagtgtttgaaagagttgggactagaagcacatctctggtctccagtcaagtgccttttctagttgagcttgacttctttatatctggataataaaatcaatctcatacaatgatataggtcatatttttccaaggcagttaagtattcattcactcctataccatcaataataatgacaaacatttatataaagcttacaacctaggcagtaccctaattgctgcctagcaggctgtaagcgctatatgaatattgctgtatgaatgttgcctgacgtgaagagttagacactgtagagtaattttccttatattgccttttgcttaatattgcccctcttttaaatcttcacaagagccacattaactaggtactgttgtcctcatttcatagttgaaggaggaaactgaagcacagagactttaaatatattcaccaaggaaatcgagccattaattggtaaagcctggatttgaacccaggcagtctgggtttctgagcttgcgcccttatccactatactgtgtattgttccaataatttttagttgcataaacgcttagaaatagcatttataagttctctgtgctccagaagaaccagtttcaagaaagaataaaatatatgtaaatagcggataaacccattatattttaaaaaggttggaggcactggatactaaaaaaaaaaaaaaaaaaaaaaaaaagaagaaagaaaccataagagaaatatgataggtatggggggaagggattttaattgttctcaatgactatagagcaaagttagatccaataggtaggaattgcaggagataaatccgggcttaatatggcagtgcagtgaccagaataggcaaccttgttagtgagccccctatctttttgtattcaggctgtgtgactggtccctattgctacagacaggattgctgcactggaatagtacatttggagcgcaattatgctcagttaggtcagaggtaagagacgtcattaaatttcatctgaaattatattgtaaaatatgtaagggcaagagctccagacagatctgactttgaatcctggcacgatcacttatttgctgcaagaatttagtcaagttacttaactctaacttctctgagtcccagtttcctcatccatgattgggataattgtactaatctcctagagttgtggtgaggaggagtaaatgagatcattatctaaaatgcctagcactgtgccaggcacataataagtgctcagggtatattaaatttttcaggagtgagagactcattaatttttcaaaaatgaactacagtcctaattattctcttatttgggaaaggaagcttggcttagcaggtaataggactttatgctcaccaagctctcattgcctttggataaggaaccatgaaccctggatagtgaaaagtccttgtaaaggaagctttataaatcaacttatttaaaatgcaatagagcagcttatgatttaaaagcatcctgtggtgaatccttttaaaatgtgaataatcaccccataatttgtctgtttggtaagttcagaatttggcttattgtgtcttcttaaagcaaagagtacacctgcactcttatttcagtattttcatgctgggctgactttcagagaaatacagggtgcctcttggattcaggatggcataggttagggaacggatgaaacatgcaaggtccctaaagtcagtgagaacattaattgtactttgtgatgcatacattttaatgagtatgaaaactcatagagatcagttgacctagactgtatcgaggatcattgcacataggaatgctgtctgacttgaagagttagacaatgaagagtaatttttcttatactgccttctttttctctgaaatttcaaggaaagtcaacatgaaattttgacatgatatacagatcctttatgaaaaaccaagcagcactggaaacctttgcagtagaaagaacactagattaggaactggggactctgagtaagacctgccatatgctaactgcatggcatgggatagcacgccacttttattctttctttgtcttagtgttctaattgtaaaataatgaagttatacttgcatctcccgtgtaacttctacctagaatctttagtgagctgattcataaaaccaggtgtgaaattactttgtttcattctctccaatagaaaaattagaacaggaaatagtagaaacagtacttaagaggttattttctattggcaatacttgttactctgccttagcttgaactctcttttgcctatatgaagatttatgaaacattttatttagctgtgatacagagattaatataaacgtgggaaactcagactaaatgttttcttttttcctatcagctggcaaacattgacctgtgtttgaagaaacttgaatatatttgagagaaaatgacctctcccacaaattaattaaatctgagactaaaataattatatctcttcattgattccctttattttcacagtatccatgggaattttgccagttcttcatagagtgatttaagcttattgacaacccacttggatgaaatacagtttgaatatatgctggtgactctgtcctttgcaagttgaattggggaataacatacatcagataggatacttaaggagccctttttgagaagcaccatacagtttaagagcccaggtgactgctttataagagatctgagaccactttaaagatccccaatttttcacactggttgcaatccatgcaggatgttgaaaggagctagaatccataagtgaccaggcttatctttttatcaaataggcatttaaaacacatctttatgcagattcatatattgtaaagggctactattcaggacccaaatttctaatttgtcaaaagcctcaagctgattttaagagaaacttaaacttaattcaattaaggaataatgaaactgtaagtttagccaaattggaagtgccttcaaagacttagcattccatagtcaacctcagaattttactgtcaaccctaaagatgctaaaactattgagttttcaattatgtgtgataagaacatcaccctgcataatggctagtagccataattctttacatcctgaaagtgaagaagaattttactgagtcactcattgcaattcttaagaaaatcactatgcattgatatatgccattgccaatattttaatgtagaaataaataaccttcttaatcttctaataaacaaatagaaacattaaaaagttaatcacataacaaaacaatttccatgtttcattttctcttaaaaacgtagcaaaaatggaaagtatataaaaagcgattatcattagaaataaacagaataagtcattaaacgtgaattccagaaaggtgaaactgcatttatagaaaaaatttcaaacatatggtgtagagattaaaatttaattatatgtcatcctgttggaacgtgttataaaaatatgtatgtgcaataaagggtcaagaaatatttattcagtacttacttggtgctcaatatttgatgtcatgagacatatgaataatacatatataaataattgaaatttattctatttgacaatcagactttctctacagatcttatggaataataattcttccaataggtatataaattatgaacctattataagattaaaatatgtttgtaaaacatatatttgcaaaaatagatttatcagttaatccccatttaatcttactttgatgtattaggaagtttctgtggttgtttaatagaatgtagacttttggagacctcttaagatctcttacctgtcttaaatttgtgaaactcacaagtgtactatcagtagaaacaaggaaattacacaggaaaataaaaaaccaggcccagggtctgctggagatatcttttaattctatattgaagtattggatatgggatccatgatggagtccaagttatactaggcagaatatattatctaagcaatacttggttcttattgaagaactgagaagtcatgaaagcccaagagcaccctctagtgaaatttctggagtaggcttaaggggcttgctcttgaccttagctctccccctcacatgacctttgatctcccaaaagatagcagttatatttctagaatttggctttatcatcaaatcatttccagatcacaaagaaggtgggctgcttgtcaagtattactactagtagatatgcttaagcgctaagacctactatttcattgttctcatgatttttgtttttgcttgcagtatcagcctaccgtgttaaaatagtttctggaactaatataactaacgaactaatgggaagcattacaagtgtgtagctgaattgtagtacctttgtcccggcctttacctttctcatgcctctgacttttggcttaagtacactatatacagaaactgtattaatacttgcaatattcgaggtcaggggtagcaggtgagatttccagtagaggtcaaaaattacaggaggagtaaaaagtcttagtattcatggacttctgagtttttagagagatgtttacaaagcaagcctgatcttagctataagttagttaaagctgtgagtataatactattcattttgattagcaactattatgtaatacatgaagcaaggcaaattattaattgactttatagataatttgctctaaaattatgattggtaaggaatttagagatctaaatcctcccactttagggaaaaaaacccttacgcacctaaatgttaagtagcttgctcagcatgacacaaatatagcatcagggctacaacatacataccttgttcaatatcctacaagaacctgcttattaaggaggtttcaatattctttcacaattttattcttattagttttttggttttttatggttctaataacttatagacatgtcttcatacttacaggaaaagaaaatatgtaacttccaaggtcatcttttttctatctctgctttcatgtaggaggcataagtcactcttgtgattactattaagatgaagtaaaaaacataatgctttgatataaatcaaacattaattcttgaaacactgtgccacacagtgttcacgttgtgcactgaaaaaaagtggagggacccatatgtcagactgatattctagaattactgataaccacctctgagattctgtacttcaaaattgtttctgtttttattagtacctacttcctagtgttcatggaaggattcggtgaatgaatgctaataaagcatatggaacattgttggcattgattaattgttatactgaatgctgatgtctaatttgaaaaaggaacaagacattttggggattatccggtaggggtatgagctatgaactgtattaaattttgtggggggagattacagcctgatgtctttcttgggggaaaaaacctctaagatattcaagttgttgttttccattgaaaatgaatgtataaaaatgacgatttgggaagacatattacatattaggtcaaaagtgtatgattcatttctcaattcattactatactctcagtcttggctttaatctcaaccataccacctgtgaccttagtatacaacctttccttcattcatattattgttgatattcagaaggtgaggtggttgtttatggcaactaaaggcaaaattacagaattttgattgttggaaagttaataattcagtgatagttttattcccagttcttttcctactttgctattcctcaacatacagtgttggtatttagaatcttaaaactagaaaactttaatgctagaagtgatcatagatactgacaagtctgattcatttatcttacagttgaaaaaattaagaccccagcgaggaagaaaactggccaagtttaattctacatactgactttcagtgataggtcacatttccttatttttctaaaaataattgactctggagaaacaattgattccttaatactgcactgatgtgctgaaccaatagatttaccaacgtaaatcaatgttatctgtgaatagacagtacacagtattttaaacctatctattcagtagtacggtacactgccttttaattcctgtcgctttgcgatgatgctatagctcacaccgaaactcttaagtgattatctttaaggattttcttctccagctatgagtctaaacagtctgagtaaagaggctgcatggtctccccatggcctcctaaatgtttttaggaagtggaacccccttctggagttatgagagaaacatcacttctaaaatgcctttaaaagtactccagcattaacattacactggaacatttcattagctttttgagaacaataaagaaatgtggagcataataggctaatatgtttaagtggccttggtagaaccctacttaactcagtgggattttctgcagcatgcagaggtggaaaaccattccttacatatttattgtgtaggactgcctccttctttattgcatgcaatttatatcaaagagaagtgactttccacctgtaattctaaaatcaagcaagtctcaaaatacacaattagaagaatcaatgtttagatatgatgatcagcaaccagcagtgctgacttttggcactctgaatttctgtcagtaaagatggtagaggagccaacttgaatctcagtatttcctggccttttaggacttaaattttcatcagggtattaagatctatgaagtatctgagttcctaaagaaaatgtgcgatgtgagtcaaacctcattggtcacaaattacaaaaattaattcaattaataaaagttattctcttactagcaataaagctagctagaaaacttttctgcaaaatattttgcattaagtaaaaatataagctaatgaaaaatacaaagtggtagtttttatggttttattaggatttcaagtgagtatacttgctatattgctattcttgcagtataatattctgccagtactctttagctctctgagcttctattttctgtggtataaattgggactcattagtcttagggacactgtgatcattgtgatttgtttgagcttttaggaaaaaaggtgtaaattaggcccacaattacaatattttaagcaagttcaaacaaacatacatgatgacaaaataaaagtttccacatatatattagtttcctttctgccaacaagttgtcaccaaaatttattggaaagaccgaattcctgtttgtgtggcattgaattaatgatattaaaaaaagcctcttgagtgacagctggagtggctgaagtggcatatttaaaacattatgtttgtttgtttcacttactgtcaaactctgtcttagaaatactatcaactggttatattgatagatagaagctgtcttttagtttcaggatatgttttgtatcaaagtttctcttcattggtttttgggatctatatgcaaaataacatataaacacaaatgtaaaacccagctgtaattgtctcttagcatttgatgacatcataaattccttaagatttatgctcatgttgtattgtaaatatcaccagaaccacttagtatgagggtgaaaatgctaaacaaaacttattgaaaataatgcatatacttatttttcactttgaggagcgtttcctagctaccctatttaccccagtggaatttcacaaaaatgtccctggcactcaaagtttgtctaacaatgaatcaagtgggcttattttaaaattcacccctaaatatgtttgctggttttgaaattctgattttgtgcttatgtaattcaaaaacagctttggtttaaaaacaaaatttggcaaaaatactagtgcattatgtgttttaatcacgtatggtgttttgaaaaaaatagactcaaaattgacaaaattgttttattggcactacagttcaaatgcatggattttcttcctcacaagttgcgtaaaataaaaataaaatcagcagatatttcttaagtgagtagtatgtgaacttaattgatttttataaaatatagtacaacaactgcactgcaggcataaattttcacgctatgtttttgcatcctttattttacagatttcattatgttttatttgatggtcaagtctatagtgtgctttagcataagttttaaaatgcatggagctctcaaaaaagtttcttctagtgatatggatagtacataaaatctagtatcaatggcccagtgtttctctttcatagagttctttgattttttcttatattcttataagtcctttctttggaaaatatatgaacttagaaacagaagtttccctggctcatattatgcccatgagacaatgataatgctgaagtccttttcataatcaggacctttatagagatcatccaggtattcttagccaaaatatccctctcattgtacactactccagggcaacatgtggtgtgccagctggatgccctccctacatgcctcaggtggccacatttcaatggtgcctatagagcacaggccaaattctcattctctgtgttaatcagtgggagaattcccatagaaaatgggatgtgaacatatttcaggaaaactcaaagagattagccagatgattaggccaggacattgtaagttcaagttttatgtaggatttctatagcattatcttagttgaccgaagaatgctataaaatttggagatatttagaaattaaaaataatcatccttttcattttactgtgatttctccaaagagaaattcaacaatattttttcttttgatataataggatctcatcttgattcataacatcaaagacaacggatgtacctagtcatataatttgactgaaactttttcccatggtattaaaaggatctgattctacttgtagaagtctcattatacttctcttttcaattaaattctagtcaattctacaaacatttagtaaatgcttactatgtacaaagcactttaatagatgctctgaataattctgtgtatggtgctttatagtatgtaacatattttcacattcattttctcatttggtgaagattcactttcttattattacttaaattgtctagagtttcagatgatgttgtttcctaggtagaatgtttgttttgtttttgcttgttctatttttgatgtgtccagagaccattctagaaatacatttagctttccttgaaggaaaaataaggtcttatcattgtatcatcctattaaattgagttggattggaactagcggcatttcctgaaatttctgtttgtttcatatgccctcaggctccattttaagtgtttttttaatgacctaattgaaatggtttgtcaacatgttcaaaaaacaaaataattttatttactacttttatgacaatactgatttatcatatttcatgtaatatctttttaaggcaaaaacaattagatttttccagaaactatttatatctcatacttaagattatattaaattttactgctctaccttgaaatctgcaagtgccatacaacttctgtagaataggtatgaaatctattattccccatttagcatgtgcaatatgctctaatattgttgcatctaacgcagaatgaaataatctgcttctatattaatgttacactatcaagtcttatttctacatatttctgagatttttttcaagtctttctctcaaacctactttgtaaatacattagaatagccccagttttacttttattcattcattttatttcccttacccgtagtgttgaaatggaatttatcaatgctttagcattataagattttcaaataatttaaaagaaaaattatcttcactttaagcattgaatgcatcacttttttccataaacccgaaactcagaacctgtaggaacgccttcatttgctttatttctgacattaaatttgcaaaaaggcactttccaggtaacccatcagctatgtcaccctgggtatttggccagagggcagtcatgttgaccccatctgcaaaggctggctaaactagagtcttggactattagaatctcattcatcaaggtccacataaagtacggtaggtgggaagcaggaggacagatggtagggtcgggcgcaaggaacttgtttgttgacattgatgtagacgcttcttcttgccagagtgactccatgcacttattttggcatggaagactaggccaaagctatcatcttaatagaaggtgagctgcaggcaaactagagagatccatgcacagtaggtatttagagttggcttagattttatctatcagcttgactgtcatacatacttgattgatgtgcagcagggcttgaaagtgctgcattgatgttgaggactgtgtcataaggttcctgatatggtgcacatgtctgaatggagttggacattggctgtctttgcccatgccaaacaacaccagacttcagtgcattattctgcagttgagtagcagatggtgactgcagacgtttggagggggtgtgccttcaaacacaatatggagccagcaaacttacttagaaggttattacatgtcttgactttggcagctattttttaagcactgttgaaaatccaagttccatccattgttattcgcaaaatactaggcaaggttggtattccatggaaaagaaatgtgaaaacgcaaatacactgttcactatgctggttacagttacttgggggtgttttccttggtattgtctaaatgggccaagtaaacattctcagattgattattcctgaaattggtaccaaaacaattattaatattagcaatgtaggtaaattttatcaataagtcaacaacgggaaaggccatcagagcattgggtgaatgctgtagtcaaatatggtatttatgagtgactttattttctttgggttttaattcaggaaaattattgtgttcttcagcactaaaaaaaagtcaagtatctcaatatctcaatagatgttctttatgcacaaaagtatggagattcacagattaaagagcacagtaattctacatgtatatgaaagtgatttttatcggtatctgatttttttcccttaagtgaatttctaacccacataaattcattttaggcttaaaataacttttttttccagattaaaaggtaatgtacacttgttgaaaggatgtgtcaaaatagaaaatatatataacgaataaatttaaatcacttgacaccaccaatcatggataaacaattctaagtatttgctctgcctctttccaagtgtatgggtgtttctaaagtgtacaggtgtttatatatatgtgtttgtttgcatatttctaaacaacattttggattgtatagtctgtatagtgatctcttcacttagcattaattttattaattctgagtcataaaatactcattttcattagctgtgtaatattatatcttaattatgtaccaaaaaattttaattaactccttcatgtttgacatttaggtcattttccactattatttctcctactctgaggatcatttttatatataaatttttatctgcatcttggattatgtttttagcatacatccttagaaagttgatttctgggctagaggatgtaaaattctcaaggttcctttgagaattcttctccaattgtatgtaaaagtgcttttctaactacattcttaactgttttgaatagcagcattatataaatatatgacaaattgcaggcaaaataactagtttacatagttttaatttgcagtgatttaataaggaactagaatgttttttacatgtttgtcattgttttcttatttttataaattgtttgcttgtggtctttactcatgtagttttactgatttgtaagattttatgtgagaaaatgttaaatatttgtatggtcaatttcttgtgtatttttttctctgtgactatgttcattacttttatcttcttttttaaatagcttgaaatttagtaaatattcaccattttttctagtatgatcatggttctgttttatatttttaattgtgtttctcccagaatttattttagcatgttatgatgtaaacatcttacttacttttgttcttaatggttaatcaattgttccagaatcatttccccactgattttgacatcatcttgattgcctactaatttttatcaacattaggatctatttctggactatctgctttttcagttctttcaccggttctatattgcttccattagagcttcaaaataagtttgtgtatcttttaggtaaaatccttccttatctttcttttttcaaaaatgctttggcttttgtcacctacttactagtcaggatttgtttagtttgttgagttcataaaaatgtttcattggaatatttgttggaattgtattaaacctataaatcagtattagtatctttgcaatattcagtcttcccattcagaagcatagtatgttttcatacataaatagattgtatctttttattcatatagatccccaaattccttcatatatttaggtataggcatgctatgttcttgttagtgtccttaattgcctatatttcatttataattctttggtagaaaagccacttcctatttataatccacatgatcctcaacttatgtggggttccattctgataaacccactgtaaaactggaaaatcttaagctgaaccactgtaagttggggactatctgtatttattatctagttattttattcaactctcttaatagttttaataatttcttttaagttcttttggggtttcaaagttattaaattatctcctaacaaagatgactgtctatttcctttcttattcctgtttaatatcctatttcattgactataatttccaaaacagttaagtaatcgttgtggtagagggcatatttcttgttttttattatgtggtattatctctagttttttttcatatttaaggcagatattggttgttgatttaagacagatattatttgatatattggtaaagtggattaacatactattttctgaatccttatttgattattaggaatggacgttgacttttattaatcttttttttctggtaaatattgtccaattgtaactcatggacatagacttttcttgagatgtatttttcaactcaaattaattcatcatacattttatttagcacttactatatgccagaaattgttcactagacattgggattaagatgcatagccctttccctttaaaacattataggataatttgaaatgtgacagttcagcaaaggacttagcataattgattttccactatcaaattgctcttgcataactagaaaaaactttatgatcttattaagaaaactttcagagtttttttaataacctaatggtataacatgtcacaatgtgaatttttaaaattgtttaaatgtaaaatggtgattcacaattgaaattatgagtttttatattgaaacaccattgtgttcagattctaataaaaaatgtccataaaagtttataatgcctcagaaaattcatagacttatgtaatatagattgtttatattctgtaagattaggaaattggaatttctaatcacacctgaccacttcttgtagagtatgacaaaaacgatatgtgatattggggcaactcattttcatgatgctgtcattggggtttcatttctctggagtctgaatcatctgaggatttcagcatgtatttacatagatttattttcacttgaagggtttttttggtattaattttattggcttagtgtagtgtagcataatctaacttgctttccccatgtaatggtatcatttgtcttatttttgggaattctttaattttgttcttttacatagtgtgcatgaatgaaattagattttttgtatttcacacaaatatttattgagaaccaattttctgctcagtatcatgctagttattatgaattacaacacagaaaacataagtcatactttcaaggaacttactttctagttcatggatagatacaaataaggaaattgcaaaactcctaatgaaatatttatttttatagaggcatatatgtatgcctctgcatgtgtgtatatatagagagatatttatttatttatttatttatttatttatttatttatttttgagacagagtttctctctttttgcccaggctatagtgcaatagtgtgatctcagctcaccgcaacctccgcctcccaggttcaagtgattctcctgcctcagcttcctgagtagctcggattacaggcatgtgccaccatgcctggctaattttgtatttttagtagagacggggtttctccatgttggtcaggctggtcttaaactcctgacctcaggtgatccacccacctcagcctcccaaagtgctgggattacaggcgtaagccaccacgcccaatttattatgtgtgtgtgtgtgtgtgtgtgtgtgtgtgtgtgtataagttgtataaatatatttcatatagacttaatatagagagagatttatacacacacacacggagtcatattcttgttcttttagcaaatgtgtcagttcttacaagattccttttgtatatttacctcaccctgtcctcttcatgcttttcctatcattattgtacttttataattgtttcttcacttgcagcttaaataatatatttacttctgcaattttttttattgtcttggaaactacactggatagacaaatgtcatgcacattaatctgtaagatattatcagtgataatttgtctcaaacaaaggtgaacctgctcagagtttggaaataggaatagtgcaggctactataattgtagactgaaatcattgctttctgaatctcctatttgattaaagtacatacttgtcttgatttttagaactattcacaaagagttaacatgcatagtaggagaaacccaaaatgtgaatggcgaagttatcatctctattaaatggggattttagcagtaagctttggtatattaaggaagaaaactcccatactttgggctttcatgagatttttatttcataggcccattcattttaaactttagcatttggcatatattctaaggtttagtcttaaaattttatcaaattttgaaaatttctatctcccctaaatttttaatgtctgcattgaataatgtttgtcacagaccacaatacctgtccctgtggaatggttattctatcttaattcaaaagtaatactattgattagataatacttacagcttccaaacttcaaggcattttttagccaccatttctccttaacctaattctgagcttcctgtgtggtatcatttgtttgaggtcttattaaaatgtaaataaattgcacccagcatacttcctctatttgcccagcttattactatatcaaaacaatcgttttaatgaaacatattgatgtattgtgtatttccgtattaaccaaagtgaagaggaagttatatgaatatataacagagcccactttgtaacagtttttgttaaagcattttataaattggagataatctgagccgtgggagatgatgtaattctacatgacagagttcacagaaagaggatagctcctcagatagaataagattagactcttgagagagatgcattggggcttttatggcactttacctttataggcgtagctgactctcagttcttcatattaatgttgtagtgttgtagcaaagatagtaaaaataaaaataaagaaaaagagtgttatctaaaataatgtatctttggcattgatatgaaatttttgacttttaagcatcaaatttgccatttcattttgttcatctagaagctacttctaacctccatattatttcggagaaatggtttaatatttatgtagtagccggtcgtgtgtgcgtgtgcgtgttttgtgtgtgtgtataaaatctccatatgacatgattgaataaaaccaaattcatgaagtaataagcaataacaatgagtagtatcatgaataatgatcaattgcagggctattaaatatgatagtacttgatcaattactaaattaattttatagaaaacaattgctatagaaatacttgaaatatttccgttgcttaagcacaataccaaatagtaaaaataggaggctactcgttgtgtgcaggggaaaatgggtaagccaaattgggattaaaatgtgtcacgttggaatgaaatcctgaaggtccagtagtggtttattgtctctgtgtcatcagactattgatgctcgtaatctttcctcatattttctatattttcagtgtactgttttattttgtttttgcaatgggcatgtattcatgtcatagtcacgaaaagttaatgtaaaaatgtgttatgtatagcctacctgtagataattcattaagacttaactactaatatataaaatctgcctgaaggaatgggagccagaagctaaatttaaaagaaaagtattttattgtacaaataatccatgtctccgaacttgttaacattctatttttaaagcattctttagtgcaagtcatggagacctaagctcatgaggttagtcattactaggaagttacctgaatatttatgttacatgtaacagctagagagccagctaatattaatacaattaattatattctgttagaagtactatagaaacatgttatagagggcctttcttatctcatatggagtttcaatacaacttagaaaaaagctgcctgttcggacacctttgtgcaaattattaaaagaaaccctttgctcaagcagatgcagcttgggctagggaacgtgggttattgagtgaaacacactcctggactaggtgccttggacagggtacaaactatataatcagttgtgtctgctctatgttatatgccttattagttatttgaaaatggttggtgttgttccataggtcccaaattattttattcgtgcacagaaaggcaagaatcatcttcaggtgacttagcaaagaggtggttagttaagctttaagttaatactgagctctgatgatacaaatatgttactttgtctcagacaagtttaaggcagatttgaggctattctgatttgaatagcttcgaaggtagaagaaaactaaagtcaccacaaaaacatagatgagtttatagaggatctaaggttgctattttcagattgcatctgaaatgttggggtatcatatagtaaatttagatgaattgttacatggaagggtagatagacaaatatacagtagagacagatagatatctctttgttacaaaaagaaattgagatagcttaaatgatacatacatgtacaatataaatatatttatgtataaatatatttatataaatataaatgacagtaaatgaaatatataatataaattaagtaaataaaaaataaaatgggtaaacagtggaaaaacatgagaaggaggcaagaatttgacctacatttaaaaagcatcctataaaggatcttacctacatttacagattgggctctgattatatattttaaagaaatacaatgcttatactaagaaaaatcaattttctaggatgctcttcagtatgtatagggatcactgtattataatgtaaatatcaagataaatattaactttcattagcaacaaaggatattttatagaaatgcttctttgtagtcctcaatgtagactgacaacatcttattactgtgaactttagtattcccatttttaaaagatttggaccaaatagagaacacttcacacagatataattcattgaatgacagtgaattctagattatctagattatattatattagattatctagattatattacttgaaatacaactattttttgttattgttattatttgagatggggtttcactctgtcacccaggctggagtgcagtggtgccatcttgactcactgcaacctccgcctcccaggctcaagctatcctcctgcctcagcctcccaagtagctgggactacaggtatgcgccaccatgcgcagctaatttttgcattttttgtacagacaggatttttctgtgttgcccaggctggtctcaaactcctggactcaagtgatctacccatctcagccttgcaaaatgctaggattacagatgtgagccaccatgcctagcctattttttttattgttaattaatagcagaaatagtaatgaagttgggacagggttgatatccttttatagaaattgcaaagcctaataaaaacaatcgctggagaggtttgctggaaaaataccattccacaggaacagaaatctgtttaaatatttattttgaatccactctaatgtatacacaataggtgttcgagacttcaagtttctttttcattgtagcctggatattgccctattgataaccttataagaggtgacagcgtgctggcagtcctcacagtcctggctgctctgggcgcctcctctgcctgggctcccactttggcggcactttaggagcccttcggcccgccgctgcactgtgagagcccctttctgggctggccaaggccggagccggctccctcagcttgcgaggaggtgtggagggagaggtgcgggcgggaaccggggctgcgcgcggtgcttgcgggcaagcgcgagtcccgggtgggcgtgggctagacggaccccgcactcggagcggccggcctgccccaccggccccgggcagtgaggggcttagcacctgggccagcagctgctgtgctcaatttctcgccgggccttagctgccttcccgcggggcagggctcgggacctgcagcccgccatgcctgagcctcccccgacctacgtgggctcctgtgcggcccgagcctcccctaggagcaccgccctctgctccacggcgcccagtcccatcgaccacccaagggctgaggagtgcgggcccacggcgacggactggcaggcagctccacctgcagcccgggtgcgggatccactgggtgaagccagctgggctcctaagtctggtggggacgtggagagcctttatgtctagctaagggattgtaagtacaccaatcgacactctatatctggctactctggtggggacttggagaaactatgtctagctcagggattgtaaatacaccaatcggcactctgtatctagctcaaggtttgtaaacacaccaatcagcaccctgtgtctagctcagggtttgtgaatgcaccagtcgacactctgtatctagctactctggtggggacttggagaacctttgtgtggacactctgtatccagctaatctggtggggatgtggagaacctttgtgtctagctcagggattgtaaacgcaccaatcagcaccctgtcaaaacagaccactcagctctaccaatcagcaggatgtgggtggcgccagataagagaatgaaagcaggctgccggagccagcagtggcaaccggctggggtccacttccacactgtggaagctttgttctttcactctttgcaataaatcttgctactgctcactctttgggtccacactgcctttatgagctgtaacactcaccgcaaaggtctgcagcttcactcctgagccagcgagaccacaaacccaccagaaggcagaaactccgaacacatccgaacatcagaaggaacaaactgcggagacgccgcctttaagaactgtaacactcaccgggagggtccgcggcttcattcttgaagtcagtgagaccaagaacccaccaattccggacacacttatacaacaaggtgacggagttccatcacattctccatcctcagacttacatctttaagcaatgtatgtgatgtttcaggattttgtttcatggattagatttcttgttttccagacagaaacagtaatctttactattacgggttcctagattaaaggttatgacactttaatgagatgaagtttggtgaatactttgatttcctcaacatgttgtaaaagtgaagtattatgttgatccaaagatatcagtaagatattcacaattaatgctttatacattctgaatttttcctaaacaaagtttgctgatttttttcatctatttaagtctctgaaggaaaatgagtttagataattcctagaagcagatactatatgtttatctcttttcatgtgataggagttattttgtaaatccgttcataatttaaatgctctagggaagtgtattctcaagggaactttattgtggatcatcatgtaaaggaaaaattattatatagtaaatattattctctatatccatatgggaactttctgatttacaagttatttgagttccaaaaggagcttattccctttgtgtgttcccaaggaagtataacctgagtgagcccaggaatctgtgagaaaataagctggcaaatactaacctgatccaagtaagtatttggacctgcttagatctctgagctattattgttttgtataagattaagtctaaatgacatattctttacaattgcttagaataggttagtccagctccaaagttcatagcaactcattattaaccaaagtaattctagtccttctcgctgagtggtttctccaaactctatagagtgaggcaaaactatttatctcccatgggagaattttggtaaccttatccctatatcccatacacttccctagaaattcttaatcccccccaaacctttaaactttctagagatgtagtaggaggggcagttgaagattttctatacacatgtaaccattatgaaaacgttcattcaatggcagttagacttcccccccgccaccccacatgcatggatacctgcagctaggcccctgattcctgcattactaagaaaagaattaggcagtggtcattcgctgaagaaatggcatatggcataagtcgtttatgcccactatagattaaaaggtcataaatcatatcacagaagctggatacttttgggagtgaaagtggccaaattaaaagttatgttgggacaactagcacagttaggagcccacagtgttttagccgggagtgcttcctcctattatccgtccccacagttccattgtatcagtagttctgccagggcaggacaagtcatgaaaacccacaacttcactgctgaaagggggtgattcgataatttgatggagcagaacatagaaaaaccccatgcccttaggtgtggtcaaaacagtgacaatctcaggggcaaacaagcagggagaataaacatcatatgtagcctgaagttacaattcagagtagaaaagaactggcagattggccagaaatttagcagggagaattggaaaaggatactatcatagtgaactttggtaagctaccacatattcctagaggtctgaaaggctgcacacatactctggggaagacctaaggctttggacacacagagagaagataagagagaacaaatggaaagtaaaaatcaaaaaaacacttgtaaactgcctgaactttgagtgcattctacaacccacacacacgtatatatcaattagaggcgttagcatagtggccctaggtgtttaagtacaacctgtgactgatcgttggctgaccactaaactgtgttaacacaggggaaagtcccagctcaaaaacgaaaatggaaattacacaaactgagcagaaacatcagcagcggcacagcatggggaagagaggctgcacagagttatgttaggcaagtcctaaataaacaaacacagcaataacagcaacaaccctcaacagggaaaagtcagaagccagagttgctgtaatatgctatataaaatgtcaattttcaagaaaaaaatgagacatgtaataaacaggagtgtgactcatacccaatttaagaagtggttaaaagaaagtgtctgaagaaaaaaaaagaaattatatttgggttgaagtggagatagcagatgttaaacttagcaaacaaagagttgaaagcactattataaatatgttcaaaataataggaaatcatgttaaataattaaagtattactataattaccctttaaatagagagtatcaatataaacataagtgttattttaaaaggaacaaaaattctggagttaaaaaatattataatggaaattaaaaaattgcaagagaatctcaacagaatatttaagatggcagaataaagacacaatgagattgaagatcaattaatagaaatggtctaatttgaagagaaaagaacaatgaaaaaatgagcagagcttcggagacctgtgagagaccatcaagcatactaacatatgtgtaatggtagagaagaggaggaaagaaagaaagggctcaaaaatatttgaagaaataatagccaaaaacttcccaaatgtgatgaataacattaatctacacatttgagaagcacaaaaactccatgttggataaacacaaaaaaaatctgtacatagacacattatagtcaaacttttgaatgaaaaagagaaaattttgacagtaacaagaaaaaaaaagactgttacatacaggaaaacaacactacgattaacagcttacttctcattagaaacaaagccaggaggtagagggatgacgtattcagtgtgctgaaggaaaaaaagggaaaatgtcatttaggaattttatatttagcaaaattgttcttcaaaaataaatataaaataaagatatcccaaataaacaaagactgagacaatttgttgctagtagacctgccttaccagaaatactgaaggaaatcctttaagtggaaatgaaatgataaaaatgtatctaaaattcacctaaacaaaaggacctcatcacgtcattatttaggtaagtatagacatgatataaacataaaactaaattctgtttgaacagaaggaaggatataacaaagataagaacagaaatcaatgaaatagataatgaaaataatagagaaaattaatgaaaccaaaacttagttttttgaaaagatcaaccaaaacttagtttttcttttgctagactgatcaaggaaaaaggagagaagatgacagattaccaaaatgaggaatcagagagaaggtatcaccaccaaccccacagaaatgaaaaggattatgaggtatagttatagttaatactatattataaacaaatagtataacctcataatcattctcatttctatggggttggtggtgataccttctctctcattcctgatctcatactatactatgaacaaatattataacctcataatccttttcattgcttgatagttagaaatacaacctgtgactgatcattggttgacctcaattgtcattgcttaacaattagacaattgttagcaactggacaattgttagcaattagctggataaaatggactatcttagaaatgcgcaaattaccaaaactgactcaagaggaaatagaaaatatgaacagactcgtaataaaaagacatacaatttatacaatttatagttaggagaaaatcctagatgtagatgactccactggtgaattctatccaataccagtatttcacaaacttttctagaaatagagcaagaaaggtcatctttcaattatttgtacaatattacactgagagcaaagccagacaaagacatcacaatgaaagaaaactgcagaccagattccctcatgaatatagacaccaaaactcaacaaaatattcacaaaccaaatgtggcaaagtagaaaagcattatacagtgctgaccacagaggatttatcccaggaatgtgagtttcacttaacatccaataattaattaatgcaatatagcatattaatagaataaaagagaaaacacatgaccatttcaatagatgtacagaaacatttgagaaaatccagtatccatttgtgatataatctttcaacaaaaggaatagaagagaacttctgtaacctgacaaagggcatctatgaagaacttataatgtatgtaatgatgaaaacctgaccgatacactcctaggatcggaaaagaggcaaggttgtcagttcttatgtcttctgttcaacattgtacaggagattcaatccagtgcagaatgataaatacatgtaagaaagagagagagaagcaaattagaggaaaaaaaaaagaagcagcagcagctgcaggggagggggaggggaagggaaagagaagggttagacagaccagcagaaagaaacaatcagtggcatacagattggaaattaaaaagtaaaactatttatttgccggcaatataatcttgtacatagaaaattctaagcaatgtacatacacctcccccaccacacacacgaactaataaaggaattcaacaagttaactgaatataagaagagatattgtacagaaatcaattatatttcggtatactagcaacaaacaatgaaattaagaaaacagttcaattcacaatcctgtcaaaaagaataaaggcgtttttacagaaattgacaagctaatcctaaaatttacacgaatatgcaaaagatccaaaatagtgaaaatacttttgaaaaaggaaaacaaaattagataacgtacaatttctggttttaaaacttactttatagagtatgatattggcatacagatcaatggaatggaatagaaagttcagaaaattcatcatatttttgatcaattaaatttgacaaaggtgccaaggcaatttgtcatgggaagggatagtcttttcaataagcagtgctctgtaattgatgctaggattatatgcgatataaatgaatattcacgaacctaggactgtaaaaaacatattttagttcttatttcatatcctgcacaaaaatttaatcatgggcctaaatgtgagagctaaaattataaaatttctagaagaaaacaggagaaaatcttcatgactttgggttagaaaaagttcttagctatcacaccaaaagcttgattcaataaaatccttggtaattaggatgtcaacaaaatttaaaacttttgcacttcaaaagacccattaaagaaatgaaatgacaaaccaaagacaggcgaaaatatttgcaagattgcgatttgcaaatcataatctgataagaatttttacgcataatatataaagaattcttcaataataaaaagacaagcaacccagctaaaaactgggcaaaatatttgacaattcaccgaagttattcaccaaagaagatgaagtcatgcctaataagcacttgaaaacatggtcaacattattatttccagggaaaagtaaattaaaaccgtaagagactacttcacacccgctagaatggctgtaataaagacagatagtaacaagtgttggaagataaagacaaattagaagcctcctatattaccaggggagatgtaagagtatagtcactttggaaagtggtttggaagtttcttaaaagttaaaataaacttacccttatgatccagcaataccactttgaggtatctaagaggaaaaaaaatatgtccacacagagacgtattttatgtgaatgttcatggcagcattattcgtaacagtaaaaaactggaaacaattcagatgtccattggctgatgcatggataaataaaatgtggtgttatatccatgcagtggaatagtattcatcagtaaaagggaatagactactgctacatgccacaacataaaagaatcttaaaaatgaattatgataagtgaaaaagctacatgaaagagatcacatattatttgattgcattaataaaaatatccaaaaagggcaaatttatagagagagaaaatatttgttgtctgggtctagggattgactccctaagggtatgaaggatctttgtagggtgacaaaaatattctaaaaatgaattgaggtgatggttatacaactctaaatttacttaatgtcattgagttatacacataacaagagtggattgtatgttatataagttatatctcaataaactgttatgcttattaaaactaagtatagagaaacctggcagacattctcctaagcaagcgaccaaggttaacataccccgagatatcatatacctttgatgttatgttataagaagggcacatcacctcttttgtattcttctctaaaacctataatccgaatctagttacgggattggacaaatcaaagttgtaaaaggtttcacaaaatatctgaccactagtcttcacaattatcagtcatgaaaaacatggaatgaccaagaagttatcacagatcagaagagactgaggagacatggcaattaaaatgcagtatggtatcctggattggatttttggaacagaaaaaacatattaatggaaaaattggtgacatctgaataaagtctgtagtttagttaatagtattgtgtcaatattaatttcttaattttgtcaaatttaccatggttatgtaagatagtaacattaggaaaaactagtgaaggaaatatgggtactctctgtactatcattgcaacttttccataattctaaaattgttccaaaatacaaagttaaaattttaaaaagcaaatggagaatttatagattaaaggataattatcgtttgaatataatgtgtacatcttatttagatcctgattcaaactaaccagttataaaaagaaaagaccatttaaaagtcaatcatttaacatggacaggatatttaatgacattaaagaattactattatttttgatgtggaatgatattagttatgattgtcatctttcagtaacacatagtaaagtattcatgcataaaataataagctatctgggattgtctttcagatgctctggtggaagaaaaagtaggtgaaagtataattggaaaaacaattgactatgggtgatgggtactggagagttcatttttctgtattctgccctctctcatatatttgaaatattttataataaaaagtttttaaatagtggaaagaaaaaaatactaaaataaataattaaagtattataattagccttctatgctgaccacaaacagggctgtctcttaaaaatcaaatctgcacaatgtctgaataaataaattatagagagatgagtgaactctcaaaagcaatctgagcaagatacagtcagtactgaatagttggaagagcaataagagaagtgcctgaattaacatagacctcctaagctggaatgctttgttgttctttccttgaagttctgtgacctggtgatatctaaaactccttctgtgtgaggattttagaaagtagaatgtggtcagaagcagccctttgttcgtagtcaatggtaagatctgtagttctcaccccccttcaggttttgttttgttttgtttttttattgactagaggctttgtttgtggccttgtgacttacaagataggttactgcaatataatgcatttgctacttctctggaaagccattcagaatctttaaggagtgcagaatgtacaactcttttgctaaagggtctctgccagagaagcattcttccggattttgtatattgcattgattacggagctgttgctcagtgcatcattggatgttgactgtaatctataaagccttacatagttttcttccaattaaagaagtctgacactggtggtcaattttaataatgactgagattgatctatgtgacttaaaattttaacagattttggaacctgaaatgtgagaaacaagttttcttattgatgacacatactctgaaatctattttaaaggtgggttcagtgtacagtagtgaatttgaattaaaaaaaaaaaaaaaaacagaaagttgaaaatagacaaaagtgccaaaaataaggtatttgtcctgactttctgttccttcatctcacctgacattccctcagaatattttacatccttgatgaccagtcttttaagcaattctacctgataaccccactatatagtgacagagttactgatttgttccatgaggagataagaagaggagcactattcatatcaaagacaactggtcctacttccaggtccatctttgggccaagatatgtagtcgccaacagtgagttggcgactatattttttgagtcctggcgcaaagtaagatccatctgttttgcccagccgtttgcctgagtgccacaaaatggtcctgttattagtcttatttgtggtcctatttgaggttaggtataatgtaaataaatttcagttctcctcgtgatgagtagtacagcatgggaattaagagggctggtgttggtagttgtaagtgatgttgagtctctattttttcaattgctctgttttctttggattgggaaacagacatttaagaatgagtttgtcatctggaaggatagttgtgaccaagtttccctcaacaggatacaagatgttatttttgagcctcattaccctcaccaagagaaaaaaaaaaaagaaggaaaaaggaataagaaagaaagtgaaagtggagaagaaacaagcagaaatagaagaaaaagatcaaagaggagaaggagaaatggcatggggggggaatgaaaattggtacactgaccatctattcatataattgatttaattattttgagctgatagttcaattcattcaacatctggcaaattgaggagaaggaaacctgactgaatgaattgaattactagttgttagttatatgtttatatgtaaatattcagcctagtttctatcaccttttcacgtctaaactagagaatgaatttgtttcgctaaccatattttgttggtgagtagaacaatgccagttggtgaattagatttatccagaggtgggcagttttaaatttctgaatcatttttcagagattattgttattcaatatatttatattatatctcataatttctgagcacaagttatttttgtcagtttcttttatgaatattttgctgccttataaggaaataatgtgcactcccctcctctcattcagttgtccctggtgacgcctccataatttctgcctttacgctggttcatttttagcctaattcaggcatgtgagaggagggggaaaagtttagttagtcaatgtcagtgattttttttaaatctaatctcattcatgagtgaatttactgtgaacctgagcatgtttacgcttaaaatctatgtacatcaaatagaccaattacccaaaatattcctctatacatttcaagagaaaaagaaaacaggaatcccaagtaagaactacatatgctttctaataatagtacaatttaaggggtgatttgtgattatgctctcatatggggaaatattaaaatattaccttgcactaatgtgaaattggatgtaaacatatgacatttagtgttataaatatatagaaagtattctgccacgctgtaaagtgaatgaaagcgaattatattacctcattttatattttaaaaactaaatttttctaaatcccattgtatcagtttttcaaagctaaaagtaaggatgatttaattctagtgtgtgatgtgatttttttaatttaaaaaatactattatttatagatggtgttgtttgaagaaagaaatgattcaaaaaatagtataatattttaagcctaatatttattatatacttggagctcttaatgcctggactgttacttaatttggaattataagtacatatttaaaaaataagcaacatgcttacagttacttaaaccagggagtgttgttcagactctcttggtcttcctgtgctgcttcaaacagcagtggctgcatgtgacaagatgtacaatatgatgtgaaatggggcacgctaaacccataatacagtacatttcaatggccattttgtgttgttaaatatgtttatttagcccttcttcaccatctacctcaccagcaattcagtcactggaaagtaggagatctagcatttcttacaattccatttgaagtcataatttccctttaatatgtgtattcagacccatagattttcttctttattccctgaacttaatattttctgtaatctttaggctgtagaaattgtttaggagtttttttttaatcagaatatagctaaaattcagaaacattgagtttctagtcatatcattatgaagtccttaacatggaggcgtattttgtttttcagaattgctttttttctcctctttagatccttttcttttcattaaaaaactactctgggaagagggttttttcttttttttttttttccttaacagaaaaaaaaaaaaaaaagaaaaaaagaaaagccacgcttgactgataatgcattgctttggatggtgaaacattatgaaagtttaatttttaattaaatctgaaataccaattataactgaaagagattttaacctgtttcttttcagactgcctgaagttacatttagagactgaaatcactgcaccttaaaaacaaaagattgagctgcactgtattcctgtaagtcaaagctttctgtaccttcttctgtgtttctgtgaccaacccaaaaaaggacaaaaacattggtaacatagtaaccagacatgagtaaaaatttgaatgtccctgaagaaatatatgtttaaatgattttcttcttaaaaaaaaaaagttgttggtctcaatattcagtatgtcttttttatccaacctaaattgtgaatcctttcttttggctggtttgaatttcattagggagggtgtcacccactgtgcatgagcacagtgacacacaccctgtctggaaagattcttgcttttttattttattttattttattttattttattttattttattttatttttactagtctcactgaaggtaaaagatttcttttggaatcaaagtagatttcattttcctttgtgatgtcattagaaatttttagcctttgtgtcaatggaaatggagagaaagaaagttcatgatgacatcacaagattctgttgccttgaggactttgggcaaaactaagtaaaatgcataattcccttgtgtgcgtgtgttccccattctgctacgaagcagtcaaaatagcacatcttatgtcttcccgtgagctacaaggctgtctctcagagccccattgttccataaatgcatgtcagagtctaccacagtctggtctacccttatttagctgctgttttgtcaatgtacttggaagaacaattaacatttgggatttcaacgtctgaataacaggcagtgaatagaacccaagcatataaaagattcagacgcccagggtaagaaaacagaagcttatagttggtgaagaaaaaaaagaaaagcatttttaatgctgcactcaaaggttgtgaaatactacaaggaaagtcaatctgtttttatttttaattttagatcaaaatgtacattttggtaataaaatccagaagcttatgatgtcttcctcagttttacagtttaatgtattgcaagttctttcgctaagagtcttaaaacacttacccttctattgttggaatgccagatgtggagtctactgtatcgtggtttttagagtgtcacagcccccagtcaacagagtacactaaaggtgattcagacaattgcttccattttcactgtagttcattgcactctttattgactgtagttcttgtgtgttgacagtagacagttctggagttgcttatatgtctctgcctatggtctgaattcctgctaagttcatttttgttaagcgatgatgcacggacagagcaaggttaccttactgtgattgcatctggtgaaatgaaggagactttggcactttgtgtatgttgcccactgagcatggtgcctggctggtatgagtgaataaatgatagttattgttattgttgtcataactacaacagttcaaacccacagacagtaaggtctctaagagcaggggctctctctttcttactcatttttgtaatttctaacccttggcacaataataggtaatcatgaaatagctgctattagtttaatttcaaaactttttaaaagtcagaaatccagggttcattctgtcagagaatatttattgtaaacacaggttgaatacagtttttgacagtcaggaagaagatgataaaggaatttgccaaacacaacctttctgcttatcatatcatacgaggtatccatctcccagccccttacctcattgactttacacttctttttcctgaccaaagtgagaattgaccattcataccacatccttttcacctatgaaatggtcttcagcatttttccacttaagttgtgtgttttatatcccacacactagaatcaactccacaaataaatatgcccaattccagggtagatgatgctctgatacctcagttcgtcttgccatattatagattttgtttcagggaaatgggacaagtggtacaataagtattgggtcaagaggccagggatttgggaaggaaccattagcagaatgtacttttagtgcataaaaagctaggaccaacttttcaacactaatatgaccacaatattctttagaactcagaaccatttgacaccttctaagttgtttttttttcttttttacatacatttatctgcccctcttccccaccatcagtttttaaaatttatttccaaaagggattctttcatttttattaaatgagcttctggtgatgcaaattaaggctctcataaaacttgacctctgaggcaatattaaaatgatgaaatttaggcttagtgaattctactgttatcatgttcaataacatttaaggacataaaagaattttataaaaacattttatatattttaagattgaaaagtttaggcaaatgtaagggcagagcatcaccaaacattatagtgggaaaggatgtaagaaacaaagtctagtgacttcatttttaaataagcaaattgaggcacagggtagggcacaaaggttacacaaaccatattgaccaccatcgcagatcatccttagagacctagacgtgatagtctatctgaatttacaatctgaggcttcaatctttccactacaatcagggtctaagcaatgtttcctgaggagcaaattgccttgggctcattttttgagacttgttgaattgtagtccccttcatcagaatctcaaattcatatataaaggagtatcctgaaaacattggttgttatcaaaagaggtttttttgtgtgttttttttgtttttttgtttttttgttttttaattttgttcctagtatcatgcctttggttgagcaacgagtcctgtagaggcaaatttatttggttgacttaatattctttatgatgatttacaaagtggacataagaccattagaacttcagtagtttaattgggcttacagacatgatgaaaccagtaatctgaacagaaccatagtggtgtggaattcaaacttcccaagggtgtgtacgacgcatggtgtcagaatgtcactgttgccaggggtcatttccatcagagaaaagttttccagagtcagaaaaaaaaagaaataagctttaatattttaaaatgaattacttgctctggtcatttgtttcacattgctttcattggattctgtcatttaccaatccaaagaggctacggtaaaaacctgttattttacccaaagctaaattctggacattttctagtttcttcctttattttaacccatccaggtcttccctctctccaccatgtactgaaagttagtggccttaagtctttgtgcctcaaagacaaagagacaatagttctgccctttaaaaattccatggaagctttggcatatagagaaggaggaatcgagacatggtgataccagagcagggtcctagatgtagatgttcaacaaagttctctcttcaaacctcttctccctttcctttataataatgaattaatgttctgtgcctcctataacaaaatattttaccaagatacacagataaataacacatattttctgttattaaggaattcataatttatctgggaaaatcgcatctttcttatagacaaaacattatatggaatagcagaggaagtaaatggttatcatttttttctaggccatgaaggaataatgtgatactagcaagaagcctatgaaaagggagtaataaatgaaagtcaggagaacattgatagtattggtgtgatttcaacatagaatgcttgttggggacagtgactagaggaggaattggatgagaaccataatgtatgggaggatcagttttccaaagtgtgggttgcaacgcattagtaggtcatgaaagtttaaaagatcacatatactagaatcacaggaaaataaatattttttaaagcacatcacatatttttaagatactagatggcaaaataagtgtatttcttatgagaattatgcaccaaaatataaaagcagcttaaacatgacagagcttttaaatatttaactcatgtaatcctaattaagggataaaattattttcttccttatatatgagaaaatggtggagttaagcaatttgccccaggatatacaacaggtaaatagtagacacaggatgtgatcacatctgtcatactccacattcatactcttctcatgacttgacacagcttctcagagttacatgacttcaattatttcactatggataactcagaaatttatatctccagtcctgatatgtcttcagaactttagtcctatatttccaacatccttatttaaatcttcaactagaaatcacactagtttctctgagtcagcatatcaaaacttaatttattcttctacttaaaaaccatcctgcttttgactatcctagcttctctaactccaattctctaggacatctttactcaaaatatatcattctttcctcctcttaatacatcctagatgtccagtaagtggccaagtctcatttattctctttctttgatacctgttccagtcaggattttatcttctcttgcttacaaaaatctcctaattgaaagagatggagcagggagatcagtttatcctaaacactgctgccccattaactttcctaatataggagtactaagattatgtcgcctttgttcagataaaactttcaataattctgtgtataacaatccctaatcaatatacatgacatcctaaaatctaactctgatcccatttcttagttaattgtcacctaccgggttgtatgtactataaactcaggccgagttctcttactcacctttattcatattgttccagcatctggaatgtccatcattcaattttttcatatgcaaatccaacccatcctaccaagttcatttccaatgttatgaatttcatgaatccttctttccttgacctggacagaaacaatccactctcccctaactatcaaatttacttaccacctgtagtgaccctgctgacaacttgattttggacttgtagcctccaaaactgtgagataataaatattgggtattatttataagccaacaagcttgtggtagcttgtcacaacagctctaagaaactaatgcaatactcatctacacttttattgagacaggaattactttctatattttatagcactttatgtgtatgccttattcctttactagaaaacaaaattttaagggaatagtccatatttaattaacatttcttagccctactgagtctaccacaatagaatcattgattcattattcaactatatttaatagtagaaatatagaaatgatcccttagaccttcatcatgaaattgatagtctcctaaggaaattagacatgtaataagtgcaaacataattacaacattacaagctgtggtccacataaagtgttatgtatgcaagacaacattgagtgggggaaatctcttatactgtcctttgggtgttcaggacagaattctcagagagagtgtcctttgatttgaacattgaaggacagaaaataatatcagccaggtgaagaatttggggtagagaacggagtatgggaggggagaaagctccagacagaaactgcatatacaaaatcctgtattcaaatgcaaagctttgaatcagactttctgtattcaaagaactaaaaggacttcagagtggccagagcaaagtgagcaaagcagaatggctggaggtgtggtcagagaaatgccagagtgaggaattttaattttattctgaatgcagtgggaaagcacatagtagatacacacaaaaataccaattgaaggatagctcaagaataggacaagatcaaaattaattcaaaggtaaataatatacacatgctaacaaaatccatacatttattttaaatccttcctgaaggtttacctctgagtttgaggagagcttggacttctgaaatagaggtcttataattcaaaacatatttctcacttgcataaacagagtagatctctgacaaccttctaagataaggtcaagttaattttattttctttctagttaataattattaaaattctgttgttggttaacggatttcttgtttttgtttatttttaagtggctgttgtgtaatgtagagatgcataccaaaaatgtgttttgttcctagaatgtattttttatctgttaaaccttaatctcatttttaattttggtgtattttatcatgtgcaatgaccgggcacctggaggcatagaaaaccttgaaaataaatcatcattattctcattattactacctacaacatgactggatttctggattgaagaacaatccaggctttttttaagtatgatgcattaataacatggtatgccactaagccagaatagagatattggtttgtttgcaaagtgatggaaattatccccttttgcaattaaagaagaaatagagtagagggaatgtggaaattaaaccatagagaagtagcttaagctctaaagatatgaggatttatctgctatagctcagtaaaaagaccctggaaccagaaaatgttatagcgacagggaatcttaggaattatttattctaacctcttcattttggagacgaacaaaattcaggcctagaattcctatccaagtcatagttaaatagtcaatggcaggggctggtactgtaatcccaatactcaggagctaaattaccacagccaaaccagctaatatgtgatcaaagcccctatcataaccctttcaaggtcttgtgtagaaaaagaaatattaagtgcaggagatgagtctatgtacaaaccttaattaataaaaaatctgaacaatatatattacaatccatttacctaatataccagatactgtataaagagttgtctgtaatccttgctaccacactcagcaactacccagcaaagtaggaaccattcccattttataatgaaaaaactgagccccagaacgattaagtagcatctaaaattgcaaagccagtaagtgaggtttgtattactattagacctcactgattcaaactctgtgctatctcctgcttggtgtttttaaatctgttgcatttagttatagcctaagctagtgtggtcacagaggtcattagttctctaatagcccaaatgtctaaaagactgaaaaaatttaggagggtaagaaaaatagttacatttagcagatgccctctccataaaactcttcacatttaattctcacagcattgactgtagattgatgtcataatctttagttcacagtatcagaaactgaggctcagtgagattacattgctgtatacattttagtggaaaaaagcttgagcctgcattcatactctgatatatctgactgtaagtgttcttcctattattctacccacatccaagtctgttcttctcttggatgctagttagttttctatggtttacgcacctcatctggcaaagtagaattgtaatacctgctgtcatagacttcccaaaaagagagagtgcgttgagaggttggctttataattatatcataatggctggaaataaatgtaatgtcctctatacatttcctcctttgaaaaatggggatctgggaagattggtaagatctttagcattagactttcatttctgcatcatcttgatttactgtgtctgtgcccaataccccatcatatcacatataatcgttccaataacctagatctactgaaaaaaacctttgaaaaatgaatgagaagtaaaaaattgtaattattagaccaataagaaggaataattccaatgtttaataattggggtttggtgtacatttttcttcttaagactaacttaattaaagccttatagtgtgatcagaggtaaaggcctatgaaggtactcagccttattgctgctatcaaaatgcaaaactttggggccaggcacggtggctcatgcctgtaatcccgtcactttgggaggctgaggcgtatggatcacttgaagttaggaattcgagaccagcctgaccaacatggtgaaactctgtctctactaaaaaatataaaaaaaattagctggggatggtggcaggttcctgaaatcccagctacttgggaggctgaggcaggagaatcacttaaacccaggaggcggaggttgcagtgagctgagatcgcaccattgcactccagcctgggcaacaaagcaagactccatctcaaaaaaaaaaaaaaagaaaaagaaaaagaaaaactttgaaaattcaaacatacttatgaattgctagcactgttttctaaagaccagtgaggaatacatttgaagtgaatcccttggtaaaaccaggacagagagatggacgggggttgaaacattgctgatgatgggtgccactgcaaacataaccctgaattaccttccatgtgtgccaactttaggagcactgcatgtaaacacccccatttctgaagaggtcattttctattactgacacacttgaacaagtattctaaagccaactcttactgtagaataattatctgagtctgggaatgggatgtggggcatcagtatacataacaattttacggtaattagaagcgatgctacctgttagggtcctccagtagttgtttcttccccctacttcttgagctttgacttctgagattatctgtgtgaaagcccttagcagtccattgaaatcttctaaagtaaggcagttaaaaaatatctttcctgcttagcagaagggactttgttctttggcaccaccttactctttgcaatatgttgctagtagccctaaatcagaatgtgcattaatatatcttttgaattgtttggtctcctcaggagaaaaaaaaatgttttcaacaatcttataatattttgttaaaaatccaattctggttcaatgttttgttctcaaaggaattttgaatgaagaaaaagcttttgtaagagggaggaagcttatctaatctcttcaagactgatgagaagcaatcaggagcttgtgactctttgaaacagtaaatttctagggaattgggcacacgtttctcaggaacaataaagagtgttacacttcaggttggctctaaatgcaccccttcatgtatcccaaaaggcaatttgaaagcaccgttctctgagtcaactggaaaagggaggaagccatgctgagctgagattctttcagggggtcaagagacactgaatacagaatgaagatcactcttctgattactgtcgaattctcagttataacctttttaataaaatgtcttcaaagatgtaggaaaataaattggctcagacaagagagttactggatattagaagatttagatttttgacaaggtcttctacttgtttgcaaatgtactatcttgaccatataaaatttgcctaacctttgctaaaatttcactgaattgttctttgcttacattacttgatattttaagactttgttagataatcaataagtgatagatgcgtagcattgttactgttgccattgttaccatcagtgttctcttcccttctctaggttagggttggcaggtacagctatgaacctgggttccacatctaaccccacatctgctcatcttcttgtagcactggaaagtgtgaggggcctgactagactctggctgctcagtagttaacctacactcatctcacctgaaaaacttgtcagtgaagttttagtcacaagccttttagaagatagaaaaacagtttgcatggaaagctctcatttttaaataaaaactgattatatcaagctaagtgagactctctaattgatgacataatactgtctacgttatcattgcttaccactagcaaggcagcaagtataattggaaggaaagagtatggggctatctggagacttgattcaggtgttgtcagttttgtcttaacatcattttccttatctgtaggggacactttctcctatcttaatgacacatgcagaaaagtcaaatgatatatgtgaagcattaaatatttagagttccatggaataaggctagtttataaatatcatatattacaatagaagtactagtggaaatgtaaatcactttgaggtctcaagagtaaggtcctttatctgagttcttagtggttggaaatttgtttttgagtcatcatatagggaagtcttctgttgctactaaatactgatcatgcattggaaacaatgaagaatgaattgctagtgatatattacttcttttaaatagttgctttaaaagcatttgttactataaattctctgagaagtttctctcaaattaaaaaaaaaaaaaacttactgttatgtctcccctatgatagtcagtgactttctggagggcaaaaaaccaggagtacctcactgattttctttcttggtcaccaaagctggtaccagataggtcttcagtgtttgttgagcatcctgtgtaaaaatttagtaatacttttagtaaaatttgtaaaaaaagaaaaaaaaagtatactgatttcatgaattggactacatgcatatcatatgatatggacagatgattcatccatgttattgaagataatgcagccattaggaaaagaatgaattatatctatagctgttaacctggaagaatgaccataattttcagggtaatgagtatttatgaataaatatgttgcgtatgtttatatgaacatgaagaaagctatagaaaataattcataccatattcttcacattggttatttcacagagttgggaacaaaaaaaggaatcaggaaagattattaattttttctttaaatagcttttattgtttcaccagttacaatgaacatctattattaaagaagtttgcaaattaatacataaaattgttttaaaaattctttaattctcagataagcagactgagaaaagtaatcagcacacagaagttttagtttcatttgtattgcaacttctgcagcacaaaagaaaatgcatactgtaagcagactgattcatttaatcaacaaatatttcctgagctgtagttggtactagttcttgttaatgaaaatgtctgtgtgtatgagtgtgtgtgtgtttgtgtgtgtgtattcaccgtgctttggtgtataagataaatgtttacttagatgataaattacatcatgtttcacttataaacctcaggacaagtgtttaaatggaacaaaaatatacacaatcaagagacttgatgacatttccagaactctataatctgcttaaatatttacctgtttatcttcttctcacctcatgacttccgcagaccattttcatgacttttgttctagtataagttttataatagcagatccttataatctagatattaattatccttgtaactgatgcctcttctactcttaactctaaaaggatacttaatcttttctagcttgagtggatcttttgctatttataattctaaatttctcttcccttcatctcagtatgctccaggccctaaccggcttttaaaattaccttcacttgtttactcttagctcccccaactcaggatcattttgtctcagaggttcctaattctagctgcatattaaaacctataaagtttttttaaaatgttaatgcattggacccacccagatgttctgctttggttgttaaaagatggagtctagttgcacgctaaccgcttataggaacccaactcctgtttcatcttaaaattttcaattcagtgaagtcaaatttaacatgcttcttcacattggaaaccatttttctggatagtgactgcttctctaaccagacaataataaagctttaacattatgcataatacagctctatgtatcatcacacagatatgcatgtgacatgcatacaaacacatatgttaagctaatgaccaaatttgaacacataagttgataaatatacaattgctctttagatcctatgcatgaaaataattaattagaccttgtgaccaaacttgaaaggtcccctgatatggtttggctctgtccctacccaaatctcatcttgaagtgtagctcccataatcttcgtgtgttgtgtgaggcacccagtgggaggtacttgaatcacaggggcggtttttcctgtgctgttctcatgatagtgaataagtctcatgagatctgatggttttataaagggtagttcccctacacacacactctcttgcctgcctccatataagacatgtctttgctcctccttcactttctgccatgattgtgaggcctcaccagccatgtggaactgtgagtccattaaacctcttttttaaataattacccagtcttgggtacatctttattagtagtgtgagagcaaatgaatacatcctgtttaaacctaactattgtaaatgaaatgtcctatattcctaaagagtgtcagaatatgacttgagtctgactagtgaggaaaaaactggtggctgacaataatgtcaaaaggaatgcacagttgatagccaaaaggtgaaaacaatccaaatgtccatgaatggacaaatggattaacaaaatgtggtccatacatagaatggaatattattcctccttaaaaagaaataaaattctgacatatgctatagcatggataaaactttaatgcattgtgccgagtaagtacctagtatagtcaaattcctagagacagaaagtagaatagaggttaccaggggctaggaggaaggggaaatgggattattatgtaatggttacacagtttgaatatggaaaagttaaaatgttctagagatggaggtggttttgatacttgcataacagtgtgagtatacataatgccactgaactgtacacttaaaaatggttaaaatggtcaatttttaatatatattttaccacaataaaaaaatgtacctttgaaaactctttaaaaatatcagtgaaaatacattgcagttacagggtttagaagaaaaattgaactacatagtctgttcacagaatcattagatttttatgaaatatggtaatttattggcttaagtaacagtctttaccttgctgtcatacttacaaaattcaaatactagtgttatccttgattaacaggcagtaatgactgtaatgaactattagagactatgttttaaacaagcagagaattatttaaatttgtagctatgttagacattctcattttggtcaactaatggcagggaggtagaactgcaggtttctttttcatcaacagtgttatctcttaccaaattatcttattagtaggagaaaccatggctttatttgagcctgtattttccaataattcaatatgtaatcagttactcccttttttcctctgaaaatgttgaatatttttactgacattaataaacttcttggtatacagttctatgaattttaacatatatatagatttatgtaacaagcaccaccaccactatcagaatatgaaagagttccatcacactgaagaacttcttcctttatccatcctctcaccactaactcatggcaaccacagatctttttatcattatagttttgtctttccaagagttgtcatataaatggatatatatgtatacgtgtcatataaatggatatatatgtatatatgtgtatatatatgtgtatatacgtgtatatatgtgtacacacgtatatatatgtatatatatgtgtgtgtgtgtgtgtgtgtgtgtgtatgtatatatatatatatatatatatataaccttttaagactggcttctttcactcagcttgatgcattaagactcattcatggctgggtatggttagctcatgcctggagttccagcagtttgggaggccaagggaggaggaatgcttgagcccaggaattcgaaaccagcctggacaacacagggagaccctgtctctaaggaaaaaaaatttttaattgactaggcatggtgatgtgcacctgtggttccagctacttgggaggctgaggcaggaggatcacttcagccagggaggttgagactgcagtgaaccatgatcatgcactttagtctgggcaatagagtgagaccctgtctttaaaaaaataaaataaaatattctttcatatcattgcatgtttcacgatttgtttcttttttattgctaagtagtgttcctttgtatggatatacagaagatcatttaccattaattcactgaaagacatttgggtaatttccagttttgcattcccactggcaatgtataagagtttcagtagctccatatccttgtcaatatccttgtcaatacttgatattagtatttttttattctagtcattataaaaggtgtgtaatggaaatactttttttcttttagccacatttttttttcttcaaactgtagaagataatgtgattctggagccataatcttttctgattctccttttcagtactttctatttctatgtactattttccacaggaaaaagatctattattattatatttctgatactattattttcccccactcctcttggaaattctgttttttcctatgacagtatattaattcaattttttagtttttctgaaattcctttttttgtgtgatttcacttttatgtggaatctttttaaaaagaagctgaaaaccatcattctcagcaaactaacacaagaacagaagaccaaacaccgcatgttctcactcataagtggaagctgaacaatgagaacacatggacacaggaaggggaacatcacacactggggcctgttggggagtgggggtctggggaagggatagcattaggagaaatacctgatgtagatgacaggttgatgggtgcagcaaaccaccatggcacgtgtatacctatgtaacaaacctgaaagttctgcacatgtatcccagaacttaaagtataataataattaaaaaagaaaaaaaaagaaatggtgtttctcactactatggcttgtgatgtattgaaaacatggctgttcactaccatggcacacgtttgcctatgtaacaaacctgcacgtcctgtacatgtatcccagaacttaaaattaaattaagaaaaaaaaagtagatttcaaaagtgtaaagaataaaatggtgattgccaggagctggggacagggatatcaggagaagttcgtcaaagggtacacactttcaattataagatgaataacttatggtgatcaaatatacagcatagtgactatagttaataatactgacttgcatccattaaatttacgcagagagtaagatctgaagtattctcagcacacacacatactcacacacatgcacaatggtaactatatgaggtgatggatatgttaataatcttgaccgtggtaatgtgtatttgataaccatcacattgtacatattaaatgtgtaaaattattgtcagttttacctcaataaaaccaggaaaaaatactgaaaactactccaaaacacaaagtaaaatataataataataaataacaatcaattccaccacttaaaaaataaattttaactggaagtgaaaaaacttccctctgtccctaaaatcttcttctgtcaccccctaagataaccactgataacattcaacacctgatgtgctaatctgaaataattttatttcagctaccgtgttcttaatataatttgtctccacattagacgtacaaagagaatataatttaatagtttgaagattatcctttcctgttgtattatgtgtttttcatctaactggctgagatacagcaagttttctctccaattatataattacctaaatagcatgacatctctgattttgcctcttgacccacaaagcctaaaatatttaagattttatcctttttggaaaaggtttgtcaactcctatttcagctgaaggatctaaagcccagaaaagttagatgatgttcccaaggtattggttagatccattttgtgtgtgtgtgtcttttggggtcagactattctgatattgtatggattctggagtatgtctggtttgaatcctacatccacccgttactaccctggtgatctagagcaaatgacttccctttgcctcagtttccttgtttataatatagtattgttgttagcattaaatgagataatatatgtgaaataattacagtgtgctttgcacatggttagtactccagttaactgttagctattgttataattagtgtcaatgtgttgaattcataggctatcctaaagagaagggataaatgttcacatctgatccagtctcattttcttaaaatagcagcgatgttatatcatctgtaatctgaggaaaaactggcatttattcacattcttatttttgtagtatggtttattcatccttcttttcaataactttacaagttaatagaaattatgaacttctaaaatacatgcataatttataatattgattaacttaaacacagagcactcaaatgataaccacatagcacaccttccctgagtccagcagatgatagtgaaaactctttgttctctcatgctgtgtatcttgaggacattttcactatatttaagactacttgaactgattacaattcttttatgattgggcagtggatcagtggctgggtttttaaaaatcatatttaattgtattttgtgcaatggtgaagtgttatatttctgttcactcttttctgttattcacacaaaacattacttgcccagtttattgtttctgttcatctactgcttagactacaaagccatgatgttgagctagatgaaatccagttagataaatgcagtatatattggatcagttagtattttactctgttagtcctcttgcctgtggcaactctagttaactatagaaagaaaaaaaaagttctattcctccaaaagaattaaaatgaaggaggacagcatattttctgctttaaaaaatctagaattgtggtttctaaagaaaacccactgtgtacttgataatttctaaagaaaaatttgttatggactataggttataccttgcatttaagaaccacaacgaaaagaccaactttaacttttcctcattaaaatgataagaattggtattgcctataattgtttccactgtgactcctatgtggtttttgttcaatatactagtccaaacaagattttactcttctcagccctgtagatctaatctcacaaaactaagcatatttttttcagtttcatacatcatcaccatcatcttcctgaggatgtattttttttttttttttttgaggcagagtcttgctccgtcaccaggctggagtgcagtggcgcgatctcagctcactgcaacctctgcttcccagattcaagcaattcttctgcctcagcctcctgagtagctgggattacaggcacgtgtcaccagcccagctaatttttctatttttagtagatacggggtttcaccatgttggtcaagctggtctcgatctcgtgacctcgtgatccacccgcctcagcctcccaaagtgctgggattacaggcatgagccaccgtgcctggccaaaagatgtatcttaacagaagagaaacactggagtaggaaaaatgctgccatgtttagtcttaaggaatttaagaaaataaattgatttgtgcttcatgaatccataattaaataggtagttcaagaggcaagattttgaatagcaaacagtataagtaagacccagatgtggcagtctactctgtaggtaaacaagaccaaatcagaagaaattcaaggtcaataaaaaccaccagcactttatccaaatatagttctgccatatttatgtaatgagtttaagtataaattgcttataattacatatttccataacatgtagtactttacctaacataatatgtattgcattataattattaatttaattgtctgaacctacttcttatgcagagactttattctgtcttgaccaccgtggtttccaatgtactcagcacagttcggaatttgatattcagtagattatcacattaggttgaaagagtgaatggatgaatgaatattcatgaataaatgaattttttaaaggacattattattattttatttactggactgattgccatacagggatatatgcatcaaataatagccaatttttcaagtatattgggaattaggaatacctttgatgtttatgtcacctattcacaggactttcaacttatctctgcatatcagccagtttctacattaaggatataagctctattttcacagatttagatttagtatttgcatcaagatcctgctcaaatattaccttctctactaaaattaccttaattccaccatctataattaattgcttattctctcatctcccacaacacattatctaggactctatttattgaatttattttcaggctttttccatggtttattaggcagattatatttgcacccaacattaacattgcacttagttactcaaatattcatgcatttttaaaaaagaaagttattatggttaaggggaaaaaaaacttacacatgtataaacttcaaaaatatttcatgctcacttagagcatttatccccagcacagagatcagagatccattgtcagtaccataatagctagctacttctacttcaacacgcccctccattggatagaacctgtgagtcttagctctcgctttaaaatcaatagcctcccccattgtagtaactgttattaattaactaagtcattcaatccagaaatatgccactgagcaactactgagcaaaagtgaatgggacagtttttgtcttcaagtagaagaccatataataacaaaaaaaagtatatgtaaacaaatcattacaaagcagcaggttaaaggctttgagacatgtataagatactgtgggagcatataggtggagcatttgcttgctgaagagccagcacctccactttcctcagtgagtgctttcatgttctccatatcagaagatgtatgcatcctgctaagcctcttctgctcccccattttctcctttgccttgtgtattagtctgttctcacaataaagacatgcaagactgggtaatttataaagaaaaaaaggtttaatggactcacagtttcacgtggctgggtagacctcacaatcatggcggaaggtgaaagtcacatcttacatggcagcagggaagagagaaggaaagagccaagcgaaaggggaaaccccttataaaatcaccagatctcatgagacttattcactaccacgagaacagtatgggggaaaccgcccccatgattcagttatctcccactgggttcctcccacaatatgtgggaattatgggagctacaattcaagatgagatctggatggggacacagctaaatcatgtcatcttgtgagagtcacttctcagttactttaagccacaaatgggtgtagcattttagattactccccttaaaaggatgagaatatctgtctcaaacatgtctaaagaaaccacactaaggcttttcctcatactatttcattaatcctactgaaataaaatattggtatgaattaagttaggcagccatttgaaagacaaaatgccttaacaagtcccattaatgagaaacaccttatctcccctctgcaaaatgtttaacaggcttgtacatattagaagtaacagctaacatttattaattactatgtgccagtccctgttctaaaagatttatatgtaaatttatggcattccatcctcacaacaactcttgtaaatagtcactgttgttatcctaattttactggtgaggaaactgaggcacagagagaaaaaatttgcccaaggtcaaggatggggcaaaatcaaaattcagtcccagggagtctgattccacagcctacattaaaaaaattagtttttaacttttgtgaatacatattaggtatatatatttattccttagtatcaagtcttcaaattaaaatttgcctttatatgactcttaaaaatgtttgttttttctttatagaataatatttattttaagatagagttttacaatggttgttatgtttccttcaacttgcatattctggggaagtgagaggtaatatacagtgtaaatgaatgaacagttagcatgttggtaatacaaaatatgtttgcttatttatggtaagtcatatgattccctagaggtaaacctgtctaaattgtttacgtgtttataatctaagtgattattttaaaaatggatactacgggccaggcgtggtggctcacgcttgtaatcccagcactttgggaggccaaggtgggctgatcatgagatcaagagatcgagaccatcctggccaacatggtgaaaccccatctatactaaaaatacaaaaattagctgggcatggtggtgcatgtctgttgttccagctactcaggaggctgaggcaggagaatcgcttgaacccgggaggtggaggttgcagtgagccgagatcgcaccactgcactccagcctggcaacagaacgagactccgtctcaaaaaaaagaaaagagaaggatgttaccaactttgtactatttaagctagtctctagcaatgacatggatatatattagagaatgcatctctgcttagtgctctgcaccaatgaaaaagcctttctgtttttcctcactcttcacttccaactttctactattaattctttttctccttttctcttcatataacaaccatttttgtctcaatgaaaaacttaaagtaggctttattaaaacactcacatattgtttcttcatctgtaaaatgaaggattggattacatgatcttaaaagtccctatgggaagactccatgatctacatgtttgatggagataccattttattaagaaaaaaattatgcaataatctattaccaagacacatatcatgacaatcattgatacagaacatttttattcaggatttaaagtctggttttattcaggatttaaagtctggttttattcattacagatttttaaaaattcactaaactacttcaaagaaaaaaataacttcataatttttgtgtatgtaatttgcctgtgtagaggggaattgtataaatctacccactttgaagacctaagtgtgtaatcaaggggtgtttattggaaaatttatattaagtaactgataacctgggattttgattaatttgtgtcttagaaacattatgactaagaaactagagacaagtccttgttcatttgtaagattcctaagtgtatctcatatctttccaaatgttcttgactcttgattttaaagtcccatttatctcaaccatttctccatcacagcaaactttatcatactaaaggcatcctcttatatttgttatagcacagtacagattattagctttcaggatcataatctgtgctaaaagggttaaggtagttttgtagtaggatttttaaaaattattttatattttatctctatagcactcaataatttatcacaaaggttacaaacccaaatgaaccaatttgcactgatcctggccacccattcttcggtgccgtgagttctatgtcaactagttactacttaacttcttaccaggggtgatagaactaagagaagatagtaacaggaaaagaatgttctcaaccctctaggaactcagaaataggtgagatagtgataaatgggaatgttaacaattgcctattgggttgttggaagggttcataaacaaataaagagtacctgtaattatatggcactatgaaaatctgcatagtttttttatagaaaggatatgcatcctgtccttctaaagataagttaggtgtacatagtgttaaagcaaatagaacaaggagacaaggagagtatgaagttggaattcatatcgactgctcagcaccccagatagtggaactcagtggcctctgaagtcctgagatttgaactgccttgagtccccctggtgttattaggaaattgaaaagacaacacattgagattcccatttttcatgtttattgaaatgaaggtgtatagggataactattagaatttctttagcctcctggtactttgaatgacttatgttatctttcttttggtacagtagttatgttaatcatcagttactttttttaattttatttaaaaatagactgttcttcttgttttgaaaactactgccaaatgaatactctgtgttaatatgaaagtagcaaaaaataaatgactctgtccatcttttacatgttctgtcattggactattttctccaaaagaaggattctatctctagtagcttttcaaaggtactagagaacgcagccagcatttctacttgattttctcagttcttctcatttgctgattgatctagaatctctttaagctttccataatcttatttctttatctgtatctgtagtctacatctattagcttcatggtgattacgaagattaatggtttggttgttgaaaagccatatagctaagaagaatcatagagttcaggtgtatttttagttctttattaataatgctgctaccaagtgtttttaacgatgaactagagaaagggataaactgggtggtttggtcacaataattttgctattggacttttccaattttaagttattgggttttttgttgttgttgctgttttgttttgagatggagttttgctcttgttgccgaggctggagtgcaacggtgtgatcttttttttttgaatgtgtattattattattattattattattattattattattaacatactttaagttttagggtacatgtgcacaacgtgcaggtttgttacatatgtacacatgtgccatgttggtgtgctgcacccattaactcgtcatttagcattaggtatatctcctaatgctatccctcccccttccccccaccccacaacagtccccagtgtgtgatgttccccttcctgtgtccatgtgttctcattgttcaattcccacctatgagtgagaacatgcagtgtttggttttttgtctttgcgatagtttgctgagaatgatggtttccagcttcatccatgtccctacaaaggacatgaactcatcattttttatggctgcatagtattccatggtgtatatgtgccacattttcttaatccaatctatcattgttggacgtttgggttggttccaagtctttgctattgtgaatagtgccgcaataaacatacatgtgcatgtgtctttatagcagcatgatttataatcctttgggtatatacccagtaatgggatggttgagtcaaatggtatttctagttctagacccctgcggaatcgccacaccgacttccacaatggttgaactagtttacagtcccaccaacagtgtaaaagtgttcctatttatccacatcctctccagcatctgttgtttcctgactttttaatgatcgccattctaactggtgtgagatggtatctcactgtggttttgatttgcatttctctgatggcccatgatgatgagcattttttcatgtgttttttggctgcatgcaatggtgtgatcttggctcactgcaacctctgcctcttgggttcaagagattctcctgcctcagcctcccgagtagctgggattacaggcatgcaccaccatgcccggctaattttgtatttttagtagagacagcatttctccatgttagtcaggctggtcttgaagtcctgacctccctcggcctcccaaagtgctgggattacaggcgtgagccaccatgcccagccaagttattgttttaatatatctatttaagaattcttgggtttaggttccatattatctttgggttaaaccttaaaaatagatttttctttgaatagctaaaggaaagttacctcaagtgcagatagaggatctttatttttataatacagtatatatgtgccaaatatagtttatatttgccaaatcaaatgtcactaaagttaatgatactgataattgatttagggggaaaatggctggtaatacattatgtgtgtaagcattaacttaaatggaaaatactatagatttgtcctacttcataaaaaatgcaaaccagcattagaaaattagaacatttacattcataatctgtttaatcttctgttgaatgcccttgtgcactctctttgccctgttttagttccctacttgctgtagattataagtgcccttaatatctccagtatctccacagagaattttgtcttcaagccttggcatcctgttttccactgtgccttcaacctgagacttcagtgatttcacaaatgctctgaacaatggagttttgaaatggttaccatttgtattagtttcctgtggctgctataacaaactaccacaagcctggtgacttaaaccatcagaaatctattctctcacagttctggaagccaaaagtccaaaatcggtatcattgggcgagaagcaagatgtcagcagggctgcattccttctggatgctctaggggagaatccttttctttgccttcctcagcttctgctgaccactaccgttttttggcttgtggccacatcactgcaatctcagcttctctggtcacattaagttggcctcttctgtccatgtggaatcttcctgttacaaggatacatagaattgtagttagggcccatctagataatccaggataagctccatatgtcaaaattcttaatttaattatacctgcaaagtcttttttttttttcatttaaattaatattcagactccaagagttagaacgtggacacattttgagatgtcattattcagcccaccacaccatgtttacctttgtacctgctctgcattcttcccttgttctcccttctcctttccgctagcactgtcagccaggccaagaaaaaacaagagttgtccaaaggcttaactttcctgtccgcactttgtattttagtaaaaaaaaaaaaaaaaagaaaaaaaattggaggagtaacaacatggcagatccaggcatcaagattttacagggttgaagaaaactaggtccatgatcaatggtctgcagatttgtagattttacataatttctttggcctggttcacataatttccatcctaatcctaaagacactgtacctgaacagacccagttctgcctttcctcagtgttaaccttcctccatcattgtgcctaaggcaagaagaatccaacagctcaatcaaatgtcaactccctgtcacactccattcaggaaaactgtaccatagcagtgggtcttgagtattcttatgctacataatgaagagggacattgcagaaaggtggctgtcgggaaaacatctggaagaaataaatttcctaggatcaaagggctccgtgtgcagcccagagggtcctcagggtgctcctcagagcaaacaaacagttttcttgatgagtcactgcaatttttttttttttttgccaaaagcccacatgtattgcaagatctcaaggaaaagaggtggagtaaggagaaagaaaaaaaaaattaaataaggcaacagaagtcatttttaagaattttaaccacatgaataaaagaaatatcaacatgattacaatcttttaatatatccaccatcctcaacattctgtcatgtatattgccccagagtaaagttaagtataagataaaatatgtttaaaaacacaaaaaacaagtggggcaaaggaaggatcttggggaagagtacaacactctgatacaacatattttttttgttctaacatatgaaaattggcataggatggtgaagcccaggactgtgtcccgaaccctagccagtggcattttactgaggaaaaaaaaaaagttacttatgaatcagtacagccatgctttgttctgcatgagtgttttaatagagcgagtgtaatataaggatcaggtgggctcgtgggaatggaacaaaaggttttgtaaaattaaagcaaaataattatagctctaggtgcaaagcaagcatactccagcagttgatagcaaggacctgctcagaatagagaaggaagggagcatgctggaagttttttcttttcttttctttttttttattcactaacaaaggcttttaataggtaacagttgtaaagcatctttgagagtaattaatgcacccacacaaaaatttattaaaatgaaaatttaaggaattgtctaaaatgaattaattaacaaaaaaagaacatcatgcctttcttattttttaaagaaggagagaaggttaagcaaagcagatttttgtgagattgtatttttaaatgttcctggtttatttagtatctgaatagcccttaaaaagagagttggcgagatttgttatccaccccctttagaaatactaaatggggacagacataaaatggggattaatttgctataaatgagcctcaaagccccttgaaattatggtatctccttacaaaatgactgaagtttttaataagtttacagggacctctaggaagcagaatgtggtattcaaaagaaaggaatgtgtgtacattttctcacgtggccatttctatcctgcattgcccttacccaggtcattggagctatccttccatgtgtggcctccatggaagacaaaagggaagattcaaagtgtggtattagtaatttttagctcagtatattttctatctcaacagaaaaataaaattaacttcatttatcctgtttctataagaattttaaatcattatattggtttgttccccttattttctttcatattatttcatactgtgatataattataaagtagaatatgtgcagcgtgctgagaatttaccttttactgtgaaaattatttctagtcgattgcaaaagtatttgttttcagcatgttgttggtagttatacctcaaaaagttttaggttctgaagttgagtaaattttcaaaggttaacttttctaaatcttcaatgccgaaaatcattggaaataactgcctttcttccaatattcctttgttcagttaagaccagaagctagctgtgtaaaaaatatgagtaagaaagaaaattcattttggaagataaattttaaaaactagctttggtgatgacatataaaaataaataatcatagtttttgaagataatttcctttaaaggtatgattataagacaacttgtatagtaggcaaaacataccccagtaggcatgtgatctgtgaattttgggtacatttgcctggactttctttctctttttttcattgtttcttaaatgttcattatcttcatgcctttataaactttcaagctcttttcagatttttcctgttgaagagagtggatttagttggtttgagtaatgttgcactgttagtatagtattcttgcctgtgaggaagagcacatttgtgaagttccttggtgaggacaatttgcacttgagtagatatacactccctgtgttctttttcctttagtctcgaggtattttactttctctgaggatatgactaaaagaaggaatatcggggaaaatgtatttatagtgttaagaactttcttttttcatagtagtggttcctgtcccaattctttactctatgattttaaactaatgtgtctgttggcctttggactgggatagtatgttggataatatatttgttttctgttgctgttgtaccaaccacaaacttagcagcttatgacaatacaaatttattatttgacagttctgcagatcagaagtttagattggctctaccagtttctctgctgtaggctttacaaggccaaaatcaaggtgtcggctggattcttaactggaggaaactctgaaaaaaaatccactttcatgcttattcagttcctcatggttgtgggactaagatctccatttccttgctatcagctgggaaccatctttagatccttgcatgtgtgctgtccctatatgtcagagccagcagcagcaccttgaatcattattacacttgacatctttcaaatttccccttctaccacacctcttttccaaattccagccaaaaaagttctctgcttttaagatgattagactgggccagcttggataatctaggatactctccctgttttagtgttaacaaccttcattacatttacagagtccctttttcatgtaacataacattttgccatgtaccacaggttctgggctttaggcagtgggcattttggggtgcaattattttgcctcccacagatgaattctaaaagaatgagtcacctacctccatcatacatttctagagtactctgagtattctagtgcttttgatctagaagtagaagattcagtatgaattctcaccttctaaatgctattagtagatttttttaatatatatgttatgaaacttggtaaagagtatttattttctgtttgataaacagaataactaggggcgagggaaaaccaagttgaccattagggcttgaggtagaccagaaattttttggtttatggcagtggttttatttatcctaatccttttaatcactacaaagcatactagaaccatagagagagcccagctgggaaaaggaagtaagcccagatcaagtgaatcagaaatgagattactaatttattttttattttattttatttttttgagacggagtctcactctgttacccaggctggggtgcagtggcctaatctcggctcactgcacctccatctcccaggttcaagcgattctcctgcctcagcctcccaggtagctgggactacaggtgtgtgccaccatgcccggttacttttttgtatttttagtagagacggggtttcaccatgttggccaggctggtcacgaactcctgacctcaggcaatctgcctgcctcagcctccgaaagtggggattactaaaattttaatacaggtgattcacatggaaggctgagataaatgcaggaaacagaaaaatctcaagtctttcactggtatctaagagagtgtgacctattgagagcaggatgcaagacattattaggttggtcagatagatggcaacatttcaattcataggttggtaatatgggctaaggatgcaatagttaggaatccaagttaaataaagacttcagtttaagctgaaaatgaagaggaaagttctaacactttctaacaccagaaatacatctttagataaggtcaaaggaagggccaaaaggtcaaaaggaaacgtggacaaagaggggataaggaagaggaactggaggtaaatttcatccacactttggaattctgttcaaggttggctctggtatttgggatggaagggttgctttgaatattaagagagaaatatagtacaggtaaatccactagattataatttctattatatcatttccttaaggaagaaatgagctcacccctgcaatctgccatcttgtgtattttcatattagactatatatttcagagataaaaacaggaagtaaaatttttaagtaagaaggataatttcccaagtaaaaacaggaaagataaggacaataagattgtaaatttttaactattttttttactctaattacaacagaaacctgaatatatgcttataaatttgtaagtcagtttttagttatttaataaatctaattaagtaatcacaaatcaactaacaagatagttgaagtcagatatatgtatgtttatatttttttctcaaagtatgttctactatgttattcatgaagcattttgggttttttgagtatttaaatcaactaattttttatttaggtttgttttgtcatttatttgcactttaacaaaaaacaaatcttctatttcccagttaagtaaacatttaagtaatacaaatgaaaaaaaatagagttctgagaaatatgcaattgcgtaacagaagtcatatatgggctgactcataattgcaaagtaaaatctctgcaaaagtccttaacaagtgcatgtctttcatatttaaaatacaggctgagcatccctaatccgaaaatctgaaatctgaaatgctccaaaatctgaaatgttttgaacatggacatgatgagcaaaggaaatgctcattgtagtatttcagatttcagactcttggattaggggtactcaactggtaagtatataatgcaaatattccaaaatccgaaaaaagcctaaactcctaaatacttctgctcccagatattgtagataaaggatattcaagctataattaaaatgttatgcataatttccaaaattcatcactgtatgatacaatacactttactgcttaccttttatgaaaatgaaggtaacatacagataagaaggaattacagatttctaaaagatggcgcttttttctactcagttgacaaccaaaagttgcccaggcaagaacataacaattggcatttactaagtgcttatcatatattactacatgaagtggattcttttttttttccataagttattggggtacaggtggtatttggttacatgaataagttcctttttttttttttaagatggagttttgctcttgttgcccaggctggagtgcaatggcataatctcagctcactgagctcactgcagctactgcctcctgggttcaagtgattctcctgcctcagcctcctgagtaggtgggattacaggcacccaccaccaaacccagctaattttttgtatttttactacagacagggtttcaccatgttggccaggctggtcttgaactcctgacctcaggtgatctatacgagtaagttctttagtggcaatttgtgagttttggtgtacccatcacccaagcagcatacactgcaccatatttgcagtcttctatccctcgcccccttcccactctttcctccaagaccccaaagtccattgcatcattcttgtttttttgagatggagtcttgctctgttgcccaggctggagtgcagtgtcatgatctcagctcactgcagcctctgccttccaggttaaagtgattctcctgcctcagcctctggagcacctaggattacaggtgcacaccaccatgcccagctaatttttgtatttttattagagacagggtttcaccatgtgggccaggctggtctcaaactcctgacctcaagtgatccacccacctcgtcctcccaaagttctgggattacaggtctgagccaccatgcctagcccattgcatcattcctatgcctttgcaccctcatagcttagctcccacatatcaggagaacatacaatttttggttttccattctggagttacttcacttagaataatagtctccaatctcatccaggtcactgcaaatgctgttaattcattcctttttatggctgcatagtattccattatatatatatatatatatatatatatatgcattttggcacacagtaaaacaaagtatattagctatttaacaggtgcaaatagatatatttgaaagtatattatctatttaccaggtgcaaatagatacatatgcatcagatatatgcatatatatatgatggaatagtatgtatatagtatatatgtatgatagtgtgtgtatataatatatatatgcacaccacagtttctttatccactcattgattgatgggcatttgggttggctccatgattttgcaattgtgaattgtgctgctataatatgtagcaattataagtgatttgtcaacttgtgctgttactaaatgcatgattaacaataaaacacaggcttaactcaacggtattatttttctaacaaaatgattaaacgtacactagtccccacacatggacacgtactacatgcaaacatcatccataagatatgcagtacacgttcaaaaatatctatttgcacctgttaaatagctaatatactttctgttttactgtgtgccaaaataaaattttatcgtgaaagaataagtgctatgggtatcaactcatttgagggtgtattctattgtcctcatttccaaagtaagacaacacatgtgcctaagcaagctatgtgtaatgaatactttttgagtactgtgtagcatggtagcaaaattactgggtatcagaacctgtgagttctagcctttgctctaccacatgttagatttgtgatattaatgaagtcatttaatcgtttgtagcctctcttccctcgcttatgaaaaaaggataatgatatctctcctatttactttccagagttgatagtcacatcagatgagctaaatatactttaaggcatttgaagattatgaattactatgcgaaacattattatgttttaaacaaatataaacaattcccattagtacagttaaggcaaggtctgtttcctcttacatatagccattaaaacattgaaattagtttattattgtttatttgctttgttgtatctgttgcagagtctccttgtaatttcctatatgtctgatgagttgctaatcacaatattaaatggtgttggttttcaatgttattgtaagtattagactaatgttcaaaatcagggcagtattatatattagtgcactatcaaagacagttaacagggagtaatgtagaattaatgattaaaacatgaagaattgctacaatattatatatattgctatataattttatctatttttattaattaaatagttattggtcaagtcatattttttattgatctaaattccaggaacaatgaagagccagatccttaagggttgacttggagagaaggaacacctttttatttttaatgtgtgtgtgtttttgctcggtttgttttgtatctcatttccatttctccaaatccctatccccaaccatttattatggcttggtccagattctagagccaatggtttttcatattaagctaatggataattagatggtgcagggatgaatttcagagtttatataagccctttgaaaatgtatgcaaatatactttatattttatctaaatgtatactttatatgtatttgtaaatatgctttttctttctccccaccccttccttggagagaaggttgataagtttcatttattctcaaaggaccacatgagattaaaaacacttggaactgttgagttagagctattggtaccaaagtgagcatcagctggagaaagaaattttccttttttcccctttttcccaactatcctacttgtgtcccagacatttggattggggtgggaagcagagaaggaagattagagggccagccagtggggaaaggatgagaaaatacctctataatggctttaccttttttttctttccttctttcttgctttttaactcacttttttctcctttctccctccctcctccctttctgtttccttcctcccttccttcctttctccctcacttcctttcttctgtccttccatctttcctcccttcatctctccttcttcctttttcttttcaatatttctcttcataaggtaaaatttaatcaaggacttttaattaagggcccattttattttagtgctgtggcatattcctttactcatctgcttctcatcacttgatgctgattttattcattttatcaccatcccagttttgagaatatcctactctgttctgcagaagtactagtgctctgcagaagttatttctgtaatagaaaatccatagaaatcagtgggaaaaaaggtagtatctatgcaaaacctattccttatcttcgtttttaacattttgggtccctacttgaatatcatcatctaagccaacatttttccaatgaataaaataaagagactaattaatttatgaattatttaagatagaaaatgggtgaaattaagctgtaattcttatatttgctgatataattcagttactttagatatgtagacaagaccatctccaacttctatagagaattgaaaaagaactcaggttacatttttaaccatcttgaacaagaacatcctattaccataaagagggaatagctctcttcactttttcatttcatccaagtatctttgtaccattgtttattttctttagagagaatgagtttgggaaagaaagaaaaaggtgattatgttatcatggatttctgttgtcagttaaaaatgttgcaaagcagttttcttgtagggtttgaattttctagttggattgacttggctgtcagaaagtcaagtagatctttcttctcccagattaaattgataattggctgaaataaaatgttaagaacaattagtaggggtagaattttaaagctatttaacagagcaaacaaacttcatagggctattttgtgtgtgtttttttaaacttctccagggaacacattgtataacgctataacttcctgttccatgaagtatttcttcattgacctacctgcagtaacagcttagcttatacacacacacacacacacacacacacacacacacacacacatttccatcccactattgaatccttttgaagaaaaatcaaggtacagtctcttattcatgcaaaagcatttaagagcacctgttttaaagattagagcttaattcttgcactagatgttttcaacttcttgtttaaatatgggaatgttactgtttcttgtctttcttacctgtctacaggcttttttatccatttctgtgcccatttcagattgataacactctcaataccagctagccttctcatattccctctgctgttgtttctgcccctaccttctcttactcttgctttgttcagtcctctcatgtttctccattcttcatacttagaattctctttaacttctcatctggatgaatgccttttaatttttatgtagattcaaaccccatttattagtagttttcttctaagtagacaacctcttctttacccagaacttctctttgtaaccgtttcatccatattaggctgtgtattttaaacaaacaaataaaaataagttgatatttatcttccttcttagtcaaaatgcttcttggaggttggggactctttctttgacgtgttctgtagagtatatttcagtttgtctttttagtaaagatggcaacatctcattggattaggaaaaattgaaaaccatatgttccatgtaaagaaatcatttattgtttcgatatttgtgccactcaaacactgaatgctttatttctgcaaaagcatattgattcgttttctgcagtgaatcttatatttttcaaccttcttaaacaatatattctgaacttgatttagtctttacatgatgatttcctgataatcattattgtattagtttcctagggctgccataatagaatatcataaattgggttgtttaaacaacagagatttattggatcacagttctggaagcaagaagtctgagatcaagctattagaagggatggttccttataagggttgtgggagggaatctgtttcatgcctcttgcttagtttctggagtttatggcaatcgttggaattccttgacctgtaaggcatctccctgatttctgccttcatctttaatatagcattctcccagtgtatgtgtgcccatgtccaaatttcccctttctctacaggcataagtcatacttgagtagagaaccaccttactccattacaactgcatcttaattagggaccctatttccaaatatggtcattttctgagatacttggggttagaaatttaacatatgaattttgggagggcacaattaaacccataataattatgaacactattttttgtgcagagctttaccacaatgatttctgcaggactcaataatagagatgtttgcaagctgtacatagttcttagctttgcatacttttatttctccctcacctcctctgtctcctcttcattctgagatagagccatcatttcttacagatatcattgtactttcttccgaaagtgttttcttcccatgtaatatgaatggagggtccagattactggtgttactgtgtattaaagaagaataaattggttccaaattaaagtctccttggtaagtaatgatgtatttgggcaacagcgtgtaccttatggcatttcttttcatttcccaagggctctattttccctcttctgggtttttgactatgttaacttgagataaccctataaatgaatataagattgctggatactaaggtaccaatatattattttctccttacagaaaactaaagaaatatatctcatagaaatactagaaattggtgatcttgtttactaattgctcaagattttgctcactgatataggaaaatcacagttcccttttgggtactataagatgtgaaattggatttttacagtgtctgttagacttccgtcattcaataaacataatactagagcagaattgagttgaaatcaaatgttgtgagtgggtaaggtaatgtgcacatccagttctcagcaggtggttctaagcaggatgcggggcctgcaccccaagctgctaacctatcaagggtagcccatgtggttctgagggcaccgtgctgatgagcacccactgtggttctgattttggcagccacggctgaatcaagtctttgatctttggagtgacttctgccacagtgagcatatctgtttgttttgcccctccctttggtcattattccaacctggcagtacaggacaaaaaaaaaaaaagagagagagagagaggtagaagggggttgtgagaggatacttcaggaacatggctgtaccaagtatgaaaaagctgcttaaaaattctggctctgaaagctcatgcataacatttttgctgactcattaatgaatacattttattttatgtgtcattcaacagcctgctaaaaatcactttttctgattatattttctcattactggggttttgaatccatcataaaatgcagccagccacacaaagaaaaggcagtcctgctccctgtcttttaatagtcttccttcataagtgtctgaatatgcttgaaaacatttacttcttacgctttgatattttaaaatcaattcctctaatatatttgaaaatcagcttcagaggtttgattacattttaattttatttatttatttttaattgaaaaataattatgtatttttatggggtacaatgtgatattttgatctgtgtatgcattttagaaatatttaatcaagccaattaatatattcatcacctcacttgcatgtatgacattttgttgaaatctttcaacagattttgtaataatctctatttattccaatatactgtttaatgaaaaacataaagatgactattctcattttatagctgaaaaaaatggagacactgaggtactatatatgctatttaaggttgtagcagagttagtgtcattctaacaatttaagttttcattcttatatttggggatttctatattctatgttctatgcatatgttctatgcaatgatcaaaacacttgatccacattatcttaataatatcattgaggtatcatagataaaaagtaaactgagacatagaaaagcattaaattacttgtagcaaatctcatagcaaggtcacagggaagctgatacaatcttggacttcttcttatggactagccatgactagttttctgacaagaaacatttttctccttttgagaatgtgaaggtcgaagatttccactgagaaagcaatgccttaaagtactctgagaaaactttagatttttaactctcaaccaaatatacagcccattatattgatcatcacttaacaagtttaaaatacgtgagttctaaacttcttgtttagaaaaactgggattaagtcacctttttattccttcattatctaggtctcactaagtaaaacattttaaggtgtcaggtatttatataaagtatgtgaaaatatataagtttaggaattagaatgtatgtgaaatttatttgggaaaaatagcatctactttgaaatgtgtctgtcataacttctgtttgtcatcattttcaattagaagacaaggttttcctatataaggctagagactcagacagccagtaaggaaggagggaccaaacaggctaaaattttactaagttgtaaccaatccaggtatcatgaagaaagagtacgtgaagttgtcttctatacttttaacttctatgaattaggattttcatttgagaaataaacagattctagaacgccctggcttcccaggaggtgccactaggttagtatggctcagacggatgctcattaactcatctgctggttttcccatacaaaatatctcagccaatatccatagaataaacaccaataattgagggtccaggcagtcctttatcccaaatcagaaactttacttacacacacaagcaaatgaagagagcctccttgcagctcctccataaagaaataccaccatttcatctagaaccagctttatcaccaaaaataaatgttctgtttcatggatatttgtgccatagtttaggtcaagaattatgggtggctggacttagtcaatgtcaagagagaagaaagaatgtggagagggcatcagagtgcccggagttggcaaatgctggcagttagctgtaaagttagcagcatgggattatttgaaaagagcatatgattatactgagtggtggcttccccagtgagtaccaaataagctttttcatctacattaaatacaatgtaatattgtattaatcacttggaaaaacaagaattttttctattattaactggtgagttcctgtgtcatctatctctattttgtctgtcagctctgctttcttaaacacaaccagttcaactatattattaacatcttcaaaggaaaaccctcccagactaccaaggctaatttgctttagctaagatttatttacatttattgtctaagataggcttcaataatatatggtcatttggtccagaaacagtaagtcttagttgtatgtggtaatctttaactctgaatacttcaaatgccatatattttacacctattctgggctagattttgtgctatgcacattaagcatatcattttctttcttttttttttttctttttttttgagatggagtctggctctgtcacccaggccagagtgcagtggcatgatctcggctcactggaacctccatctcccaggttcaggcgattctcctacctcagccccccaagtagatgggattacagctttctgccaccaccccatctagtttttgtatttttattagagacaggatttcaccatgttggccaggctggtctcgaactcctgacttcaggtgatccacccagctcagcctcccaaagtgctgggaatacagtcttgagccaccgtgcctggacttattttctttaattttcacaacataaacattacttgtgactgtgtaactataaagtaataaatctgatttttggtggacattagttgccctggtctcattgtgtagaatgaattcacatagtgtatatctagcttctctacttgtgagtttcataatatactaaatggaggtggtaatagtacctaacatataatgttactgtgggaattaaatgagatactatatgtaaagtccttagattagtccctagcatatagtcagcactcaatgaatgttaactattattatgtgtaagcattgtgggaataaaaatcaaacatttactgataagtgctcagtatatagtaggagctcaatacatacatatttaatgaattaataaactttgtaaattctttaaatggctagatgttactgaactatggtaaatagtattctggctgttgccttacactgttaaatataatataaagcaaaatgttaaataacaccaagaattctgtatagtttctaggagtatttactatctatgaaagagctttttgggggtttaggagtattatttcctttctcatttaacatttgcactcttagtcccatatagcatgtgctatctgactagaagtagatgtgtgaccacaaaatggacacagatttttccccttcctttaacagtcatgcaaatatgatttatcttatggtacagtgaaaacagaagcagtagaagcctgcccatagtaaaagaagataaataggcaagaaaacacagaaaggcagtgtgtgtcaagcatgtttcatgtttgcctcagagaactgaaacacacaaagtgagaaagacatgtatgttactatgtgccagtgctagagatgctgcatgcttttttgatgatatcaagacattatagttttggggaacatttgtttcttaataagtttatttttaaatcctgcaatatttaccatctgaaacatttatctgaaattgtcatgtattaaatcccatcttttctagaactggtgctctgcttctagtaacagtttgagaaagggttcaaaggtttgcctctccctagaatgttcttctcaccactggtacttctacccaacctttacaaatagttgatgcatcacttctaggaggcccatcctacatgtttatgtatatttgtgtcattgctctggctatattgtattacagttttcagttgagatgtgtgttttctcttttagagtctggtgactaaattgtgagcttcttgaataacgaggctgtgctttacttatctccaatattattcagttcctgaaatagagtagatgctcaataaatatgtatccaataaattaataaatttgcagtctcaaacacaggcatatattcttatataagattaaggacattaataaaatttttttatttgcatgttcctaaagtgattgtgaatctttggaaattgtttatgaacatattaatatgtttcttagtgctctagtcactttgagggaaattttttaatctttgaaaaacatattttttaatctctgtatattcttttttaccccgagcattacttttgcataatggactcaagtgtgttgtcaattactgattatttggttgagccacacagaaactgttagaaatccttatttttatttgcacactatctgtttggtggctttgttcaagcccatggattgtcagttaaatggaaaagtcttactttcaagcaaaattctcagcatttaatacagtgtgtagcatatatttgggagtcaataaatgttcatagaatgcatgaacaaatcagtcattgttgcaaactgatttgaggatgaggtatgagattttttttttaaggctaaatgaaatgcccagtatcacatagcaggataagagaaaatctgacactcataactcatacttctgtgtttccagactgttacccaagctcactgagaagtgcagtatatgtctgatttctcaacttcaccctgcagtaaacttttgcaatccagaggctagagacctcttttgtgaatgttgtctgcccaatgactgtgttggcaccagggagtccctagcagataaagtggaggaacatatggtttccatctgaatacaaattggtggacataacgtggtaattcaactgagatgtcctctatattgtaaactgaaagagtatgattagaggtgtttataaacggcatctgaattcccccacacccctccccatcccctttccactgtagttttatctgtctgaatcatagcaatctagcctcccagcctcactgcattatttgtgaaaatggccagtgtgaggaattattaattaaagctaacaaatcaccctgacaagctgtgccctggcatggctgaaggttgattggcgaaagtcttctcctttggagaaaagactttttgtgctcgtgacgcagtcagggacggattattgaatatgcaagttagaagaaaaatcacaggacaagcaaattgagtatttactggcaaataattgcactcttaagctgtggctctcttcctaaattcttaacattctcgagggttagaaagaaacacagaaaaatgcatcggtacagagtacatttcaaaaaaaatacatagactgatgtttcagacttgtgcaggtaagtgtgattgtgtgtgcatggaaagtgaaagaacaagggaaagcaaaggaaagataagggaaaaagcataactgttagtctggtgagtttttaaaatcaacttgtttattggagctcagcgtatttctgagttggaaatttagtttcagtgctgcatttattgtgaaagttagagacgtgagaatgagagaggattttctcaaagttgtttgtctttattagcagaagaatatgttaatgttttgtcccaatagtaattataaattttgttcagatatttgtggatatatgtgtaaaattatcacttgatttaaagatctttagttattttcaacattgttgattatgacacgtcatacagtgtttcgaacatatttgggtacaactattgcatttatttttaaaagtaaacactgttttcattaggaccaagctaatccttattgagaatttctaaagggacattatagttttggaatacttaaacttcagacgtctataataactaaagtgtccttattgtcaattgtgtggtctttttatctgtaatgttaatcagactgctaagttttgtggacatcgtaagacaggagagactagttcagaggtctttcaggaataaatttaaatacatagaaatatgagtgtgcaaatgaaggttaattccatgtataaaatatagacattaagaaacagagatactcttacaagtacagctaggttatgtgagcaacattaccagaatatatatatccattgcagatgaattgcatattctgtgataacctggaaaatgcgctttcatcgacaacaaactgtttttgaaatgaaagtaagtgactggaaaaatagtgcttttggcttttaataactatgaaaaacattgatttaaaacaaaggcataatcataatttaaactaaattaactaattaataattgcaagatgttttaacaatataacatctacatgatactagtaataggaataataataaaaatggaaaatctggtaatcacacagaaattaatcagatgactctcatgttttagaaaatcagaattttaaaatataaataaataaaacatatgttgccttctaatctattccttgagccaagtaatattgtattggttaggatttttctcttactatatcctattttattaaaaaatgtaatttgtcttggtatagggaatagagctcataagaaagtttagaaaatatattttttaaaggtttaattcccactggatcacattctgtcctcagatttcaagaggcagcctccttaaagtttcctgtgactatttgagggcaaaatttggtccattatttagaaatagcaaagggggcatttaaagcatatgttcagagacttaaccatctgcctgctttattatgaataccacagagttatgagaaattggaaggactcaaaaattgaaccagagttctatgcaagattttaaaaatacagcactctgatttttaaaaaaatgttttgcaaccacctacttttgctaagtatatcttattagtcctctatgtaagaatagtattattccacctttttgacgtatggtaagtgaatggcaaagtatagttgagtgacatgaacctatagaaagttaagcataatcctttctctctgatttaacccactaaatatgaatacctgtggagttttagacttgtcatcagtgaaactcacagtgacttagagaaacactataaaatggtgactgctggaacaaaaatgaagtccagctgctagtttctgggctgtctacaaatgagttgcaagagacatgcggaggccagactaaagagcccttctgtaatccaactgtgatgtaatgaaagtatgaatcagctattggttgcccatgctgaggggaaaagcaacaaaatatttttttaaagtgaaaattgacattattcccaggtggtactgtattcctttggtatctggaaggatatgagattcagaaattaataaaagaacaaaaatcatatttaagtcccaagcatagtaatatttcacctagagtggtcgtataaggacatatcaatatgaatataattgttaaaatgtctaatactcaattagagttcttccacattacttgagttttactagaatcagactgagactggctggatcattctcagaggaaaatatgcaaagtagactaaacttagcctgaatacaagtttttggtgttgagatgactatcactctttgttgcttaatgaaaagtatttacttaaaagaaaataatactggaagcaaaggactgaaatatttggtttgaagactctaagtaaaaaatgtatgtgtatgtatcatgtatacttctatatttgtttacataaaaatgttttcagaaatatacactttattaggctgattaagccaaaacttttttgtgtgtgtaatcgaaagactgaacacaaaaattttaaaacagaactgaaagatgtcagtcagaactgaattaatgacctggggctgaaaatacctatgtcaaatttcatatggattttttcatggtggtattttaattttatatctccctaaatggaagtgctgcagtcaagtgaatctatagcccaaagaataatgaaatatgtcaattattttaggtggttagtttttattttttattttgagtacatgcgatgtaaataccaaatacacatacatacatatgtttttgttttgtttatttgtcttatttactatttattgcaccaataagggaattaaaatggctgacaatgaaaaaataaacataaatacatgattgcagcaaaatacatgaattagaaataggtaagaaaaataaaacaataaaggaaaggatataaaaatggagttagaagtgaggtcagcataaaactatattcagtgaagtgctatacagttgcctttaaactttcttgcagcaaagttaaagagaaaagcttgttacacagtttgtaacatccataagcataagaaaataattttcattatttgtcttgaaaatggcttttgaaaacagctcttagttttccaagaaatcaatgctaaagcaactcccactgtaaagaattgaaggctgcagatacctaaaggtcaggtcggaagcagaagcagtaccttccctgggacatggatgtggaagtagaccaaagtaatccccttttaatcccagggcatgtgtttctagagagagaaaaaaaggacaccattaacgcagtaatgttggcaagctaaaaatgtgtggaaagtagggagttaaggggggaatttaaaaaaaaaatttcatgtaaataaatacatatatattttagcagcaaatcaaagattagaaggcattcacttttataataaccattaaaacatgttatcaaataaacctcttgaatcaatgttgctttcctaaattgttcataaaacacttctgtactgctgccattcttcttccacttttactttaagcagattgtcagtctctttgaagttttaaaaagagtcatttctggcttgaaatttaatatttctcgcccttatgtcctcccttggttcattttgagaagtcttagcaaattgcctattcttttcacgggtaattttgatagttaagtcacatttaataggctagtctcttctcttcgtattgaaaaggtgaactgtatagatttattattatattaccttgtagcctagtccatggtaagtagtccaaggaccaactgtatcaggattacctagggattacctatatcaggattatctagagcacctgttaaaatggagattcctgaaccccattccagaatttctaaatcagaagctctgagaatgtagcctggatctgcagtttaggaaactgcccaggttagttgtgcataataaagtttgaagtccactattttaaaattgtgactttaaacatttctagtatatgagtgtaaaatagtaggatttctctacaacaatcaatgagggtttattatactgtattaacactaactaaaacactaatacatactcaataatatgtgattgcctgctcataaatctagaaacacctagattagacaaaactctgaatttgtttgaacccctttaagccatatctcaccattttaaaaatattatttaatttttaagctatcatttattaagaactactatatacaaagtcatatgttgagtctgggcactagagataaaaagatgaataaaagagtttcttgtctgaaaaaaactcataactagaataattatgttattactaggatattttcttatccatactaggataactatgaattgccacataatctactctttaagtaaaactcaaggttccatatggtattatatcactaagtatacagttgttggtagcaattttatagaataggaccctactacaatttggaagctgcaaaacataagaaaaccctgtagggtcttcctcctccccacagtgggagattttatctcccaaaactaggatgagagggtatcatggggtcctcctgattccatttctctcatcattaatcagtgatttgttgccaggatcctttttgagaagagaagagaaatgtgtgtgagtgaatataccagacattctgagaacttgcatgtctctttctccccttcccttctggtggctcagctggcctgtaaaagatgctggagcctaaatggcagtggcctccccagttcgcaggtgaggcacagtatgaaggggcccaagcacctctcacgtggcactctttgctccacaagttacagcagcgccagaaattgagtatcaacaggctagaaaggatgtattgcacataaaggaattaattaggtagtggtctgaggaacatgacaagagcttgcagtttcattggtgattgaagttttcctggaaaccttttgggaacacctttcccctttgtttccagaaaaatataagaaatacagtggaaacatctatacctttttccttcttttcgacatatatttattgaggatgtaatgccatgccttcttttatggactagggatactgtagtgaataaaataaagtttctactttcatgaagtttatattataatggggtaggaaaggaacaaaattacttaatataaaatataaatgtggctgggtgtggtagctcacgcctgtaatctcagcactttggaaggccaaggcgggcagatcacctgaggtcaggagtttgagaccagcctggccatcatggcaaaaccccgtctctattaaaaatgcaaaattagctgggcgtggtagcacatgcctgtaatcaaagctacttgggtggctgaagcaggagaatcgcttgaactcgggaggcggaggttgcagtgagctgagatcgctccattgcactccagcctggggaacaaagcgaaactctgtctcaaaaaaaaaagtgtgtgtgtgtatatatatatatatacgtgtgtgtatatatatatatatacgtgtgtatatatatatatatacgtgtgtgtatatatatacatacatgtatgtgtatatacattatatatacattatatacaatgtatacatatatacattatatatacaggtatacatatatacattatatatacaggtatacatatatacattatatacaggtatacatatatacattatatatataaaaaatatgcttcattttttagaaattgcctcctgtgttccccattacttctaattatcctcatattatttcataatgtgtatgtatgtgtgtgtgtgtgtattccttgatgcatttgtaaaatcctccagagaatagaccagtaaattcaagacacttcttgtgggaaacttctttccatggggacctgcacataatgtaaggggagaaacaagtcatctgcaaataccaagagtgtgcattgtcaaccctaaaataattctttttcatcttttgtgcttgttctggtgtatgtgtgttctgggttttttcattgaactgagtggtaggcactcaagatgcttagagctctaagaggtagataagtaatggggtcaatcttcaagggacttcacataaagcagagaagactgataattaacaatagtatgtggccttcataaggttctgaggcagacagagtaaggagtactgtccttcaaaaggtcagagagtacagcaacaggaaaggcttcccagcaggagttatgttttaactgagactaacaacctaattgtaaaacaaaacaaaaacattttttaagtaaagtcctgaatttccccttgatcacctaagtaatgtgcccatgttgaaaatatttcagacaataggaaaaagtattttttaaagaaagtaaaatcaccacttagagaaaccattgttaacattcatcagatacttttttgagcatgtattatgtcctaaggttatgccaactggctacagcttctcagaagggagcattttaattggcagatagtgtgaatagcactaattcaaaccttaactcatttcagctgtcttcagatttggcttacagaccaaatgggccccaaccctaataaggtagataaaacaacacaaatggagtattctcttgaacaaacaccatagcacctgctatatcccccacctagagtagatacgagagtcagattccttgggttccaatcctgacttgtacctcttttctatctgtgtgatctttaccaaattattggatttctatatctcaatgtgcttttctgttaaattggatttacggtacttacctcatgtaatattttgagaaattaataagataatacatgtaaagtgctaatcacagtacctggcacatagtagagttcaataaatgctatctattatttattggtgattactagtattattactactattatagttatttttattaccagagaaacttgctgaaaatatattttgtccagtacaactccattattattactaacaaaacaattcaaaacacatttcttactgagagcgggtcagagatattatctttccaacacacattaagaatctggattttatagatgaaaattgtaatacgatttagctcagtagataaatgacattatgtggactaaatttctgtttctagatagaaataatgtctaaatgtgccttaaatgcccttcatgtcacatattttgttgcaacaatttgtgattaacttggtttgttttattaaaagaaacttgtaaatccaacgctcttatgttttccagatagtgccacctttctttattcaatcagtgatggaaaatgataagaaatacagttttacctaaagagggtattttcaggaaggaagagattctaatggtcagatctgtgatttagcataatagcaaacaaagataactatcctagcaggtgccacatagtaggtgactaaagaatctttattgaattgaagtatattttgtaagaaaaagcatacgtcaatccaggtgttacgtggaagtttaagtgattttaagagaatgcacaaattatatgctcatggacaagttactttttgtgactaaatcttcaaatggaaaataaaccaataatatcttcattacatggtgagtgtgtatagtccttggtagagttcttggaacataataggtacttgataactgatacctgcgaacaacagaaataaccacaacaataataacacataaaagtcctgtgtataatggctataagctcattaatatataacacatatgatttgtatgtattgatatataaataataacattttaaattgctttgctaatgtttgacacacagtaggaacttggtataaatttgatctatttaaataccctcataaaaagattgctttagttattttagttaaatgaaaatgcagttcaaaaatctaaaactaacttaatcctttggaaaatgacaataaaagcaaaagctacctaaggatatcttactgaaatggtcaaataatttggcctcaatgcaaatgaatagcaggaataccactctgcttcaaagagtagacaaagggaattaacttggaaaactcttaggtgacccctattttgaatcttattaattggaagcattttaaagctcaaaaggctgttattgctagttacagtggtagctacatatggaaaatggctgcagagattcacaatacaaaaatagtccattgctaaattcaaaattctgttaatgtcacaaacagtgggacgtgaaacacaaatgaattgtgatgacagttgagtaccaagctgcctattttttccccctcagagctgcccatatttggctttatattttcctcagtcctgatttaacccataaatatttgtattttctgcagctagcctcaccttggatcgtactacttaagcattttcttcctaagtgtttctcaattcctaggaattctgctttactgcttttcttcctacagataagcattttaaaatatttctttacctattgctttagagtcagattttgaatcttttttcacctacagtccgatgaggctcaatgttgctctttactctcccatttctcctcagtgtttaaagtgtaacctgcaggctagggcctatttcttctccgtgttgctttgacttggtacttgctgtcatcctgatcatctgcatttatttgctaccatcattttttaaaaactggttttttaaatgtcactcttatcctttatgatagaaggtctttatgatccggatttggggagcaagacttattttatgaacccactaaactctcttataaatgcagcagttccacataaccataagctagcttgacctttgggaaatgtcattaaaaaatctctaaagagtattgctaaaatgaccaaattatttaggcttaatagattttgtagcatggataccagacctactcacagagcaacagtcctggctgaatatattttatctgggttttactgcatgtggtgatttggctgccatgtattgagtgacctctctgtgccaagcattttacatttaattcttaaaacaattttgtgagatgggtaccatcatcttcatttaataggtaagaaaatcttgacctagagaggctaaatgacttgttaaaaggtggaaatgggatacaaaccaaagtttctaagactaacgttcatcctttctccatttccacatgcttgtgcctggttatatatttacattattggtaatgggaaagaagtttatagtataattcacttggaggcatagccaatttattccttccttccttccttccttccttccttccttccttccttccttccttttctttctttctttctttgatggagtcacggactgtcgcctgggttggagtgcaatggtgcgatctcggctcactgcaagctccgcctcctgggttcaagtgattctcttgcctctgcctcccaagtagccaggattacaggtatccaccgccacacccagctacttttttgtatttttagtagcgacggggtttcactatgttggccaggctggtctcaaattcctgaccttgtgatccgcccaccttggcctcccaaagttcatggattacaggcttgagccaccgcacccagctgccaatttctttaaaacaaagtgttggtgagattttgctatgttgtcatgttatagaactatgaatccaaggctatagattgactagatctccagtagcaaaaggtacataagtataggcaacatcctttgattttccctttggttttggaggacatgttattgtcagttttgaagaaactacaacttaatatgtgtggcttatgtactaggcattcctgacttctcatcgagtgcctcctgtgacttgtcctaccttttcctccaaaactaaaatctaattattcttaacaaacatatcctgtaggcctttttcccaccaagttttctgaagaattgtttttattataattatttagtgctttattaaagtgggcaattaaagcattttaaatgcctccatcatcaatctatatgtttatcttatgaggcattaacaccactttacttttatacagcagtttgcagtttacagcttgaaacatgtataccccaaaaatagcacattgccttttcatcagaatagggatatctaatttaacaatagtcaccacatacagtgaagcagtgagaagactggccttcaaaccagtaatcttcattttctacggaagtgcccaagcctggctttcctctttgcctttatgcagttggaccattgagttcaccagattgcaccccaaactccattattttgctttgagcaaggactgagagttagtgtagactagttagtaactttgccacaacaggtttacttttactttatttgtgtcagaacctctaaaaggatctcgtgaaaatttcctggaatttagagtgaaattttagctagaaagaaagagaaagagagagagagaaagaggaagctacaacaaaaccaaaagaaagaaagagagagagagagagagagagagagagagagagagagagagagaaaagaaagaaagaaagaagaaagaaagaaagaaagaaagaaagaaagaaagaaagaaagaaagaaagaagctacaacaaaaaccccagaaccatcttttttcaaatagtcccttgaaaagaaaactataaaaaatttatgttaagattctgggtctttgaattactcatcatgagcacttttcctgggcagtatctcccatgttcacccttcctctggtcacattgaatgttcaatttccttttctcactctgacagttaccaatgttgatatgtcttcattattatttattactttaaatttaaagcagagtagtttttttctcactttttgaaaattcaataagttttattgtgtatgtatcaaaagtcactatataactgtgctctcaatcttgttttttaaacaaatgaatattgctgtattttaaaaatatgaacgtcattttattttattttattgagacagaatcttgctctgtcacccaggctggagtgtagtggctcagtctttgctcactgcaacctccatctcctgggttcaagcaattctcctgcctcagcctcccgaactgggattacaggtgtgtaccaccatgcctggctaattttttatatttttagtagagagagggtttcaccatgttggccaggctggtctcgagctcctgaccttaggtgatctgcctgcctcagcctctcaaagtgctgggactacaggcataagccactgcgcctggccaaaaatatgaatacatttggctatttccaccctttctgttaatcccaaggatcttcaacttttattcttctctttaagatagtgagtcctggaaataaaagtgaaaatgaacagttctaaaaggttagtattttaaaaattatagtttgccattctcaggtttattcaaaattgactttctgatataactatatgtttttacaaatataagcattacctaggtagtaaaacatattcacagagagttattatcaaaaatatagagaaaaattttacatgtatatgtcccattccctccccactccttcctgagttgttgacatgagaaaatatctttccaacagtggtgtatcatttgtttggtgaattttaacgtttgcatgagatggtgttcatgtttgtgaaaaatatcgaagacttctgacttctttctttttaactgcacatggctcaatctaataaattttcaatatagattctgatatggttataatcccaatcataccacatttaaaagctatattcctgactgtgtttctctgctagcatgacgccacaaggaaaatgaaaccaacccaaacaaaaccctccttataacagaaagtaaaatgaagcttgtaacgactgttttgaaaaatggtttgaacagtgaggaacaaccaatttttcaaacactgttgtagctgtttcaagctgtagtgtggatagtgtatgcaagaaatcaataaagggaagagatctctctctgacacagatgaaacctaaaaatactgttaagaccaattctccctccatgcatctgttactgcattccactaaaaggtgttgggaaaaaaatcagccaaattctactagaacgaagcatccagacaagtgactcttcaaataattaaaaaaaaacaaaaacaaaaaacaaacaaacaaaacacactacagtagaaaaaggggaatgggggaaaaaagattaagcacttaacatgttgagtatatacccaaagcagaaaactcagtgagtgaaaaacttgtccttcaaaagaagatactttctatccttcaccagtaacacagaattgatagtctggtaacagaagccttttaagtaggggtggtgggaagaacactgtcttcccaaaggcttcagtaggtattcaattgcccagggcaatctgatcagcatgtccttgtttctagaattgagtaaaccaaatcaggatgaaccgcacatggtttaatagttaacttttagaacaaggggcagggagatgcttttacgccataggcccagtgttcattccaatctcattactaaagtctgttctgagagcatttacagctttccggagagtctgagtttggctgaatcctgaagatggaaatgtagcttaatgacctccttgtcctggagtctcccttaatacaggtgaatttttgtgataaatcattctctagaatccaaagtattgattgatatcatcattattactattattattatgattagccctttcttatgtggttagttctctctccattttcctattctaggaataagtgtaagttttgtgaatatgcatttgctctctctgagtttctttgaaacagtttatgtcttctttcaagttggaagtgtgagatattttgaattatagttggatgtgcaagtccagtcctgctttttagagatcaggaacagaaaaggttctacaaacaatcctttatttgactaagagacagaacaaaggaagggagataattgtatctttgggtgattcagtcttcggtgcttagtattgattgactagtggtctctttatcctggcctctgctttctcagattcctaaacagactcttcccttatgtgtaagaggaactccctcttagcatcttctcagtctcttccaaaggagagtaaccatggacgaggatttagcatatctaatgaatgggcattgggttatcaataagtattaagggaaaataacaacaagaaaattgagggcagattcatggtaagcattgtttgtggaactgttggacgggtctggtgtgtagttgatgttgttgttctaaactgagcagcaacagtaacaacaaacaacgaaatcctacttcccactctcttcttcctttctattcaaaaacaaccatcactatcacaatagcccagtagacaaaataaaagcatgtctatatttttggtatattactgtatgtcttaactgtagtttctctgccacacattaacagagttatttatccctgatgtttttcaaagatcacctttgtgcttgtctgcatagctgttctaatagtgttactattgtctcttcttcattatctccttttatttgagttcttttttttcacgtatgcaaagaggctctttttctaggctctttgcacacattcaccattgcactaggacagatgggtgtttttctatataatgccttttaaagtgagaagacagcaagaatagattttgaacaatattttaccagcattattgaaaaattagctactgtatattctatatacacacacagcagctgcataaaatgcaaattctattcatgtctgatctcttctgcatttatatggtgactatcgctgtagcacctaagcactttatgttatttcctcttattattatttaccacctgatcattccagagtgctttttacaatcagagaatttcattaacaacccattccctcgctctttgtttttcagcacccttgcatgtaaaagtatcaagcatcttggtagctatatcagataaattacagtaaaaagatagagggcttccgacaggagggcaggggaaaaaacaccctaaagcatctcctaaaatttggtttgtgttttatggtatccaaataatgttacagaagtctgtaattttagtgaaaaccaaaccactagataagcgcttttatttatcatggtttccaccattgcaataatcgaaagtgtgaggtgaggaagaggaatactgtctgcacttcatagatagagaggactgggcaattgcactttcttctcactgtggaaagcttgtgattcttattgactcttgagctgcctttagcccagaagtatagaagtcaatctgttttaaaatccaaaaagctactgttatattttttaagctaagaggatagaaacatgtttattaaaaggttcgttgtgattatagatgaaagtgcgtggttggtaccttaacagtttgattgaataaaaatcaagttcacactggggtttccttctcagctctactccttgctttctctttgactccaagctaattgcataacctctggttgacttgtgcctcgtctacacattcaaagtgaaattcagaaatgaggttattatctaactaatgtaggctgtaacattatttctctaaaatatctctgtgagagaattttgaaatttctgatttcagtagatagtaaaaaaaataacaattttatggaccatctccttttattcttagacaacaaccccatggaggtggatacatcagagtcagctggaggtggtcagaattatttgcaatgtttggtaagacacagattactgccccttcaccaagtttctgattcagagtctagggtagggactgataatttcacttctgatatgtttccacatgatgctgatggggaccacattttttggatcactgccctaaggatgatatggcttaagtacatatagaaaaggaaatcaaggctcaagtcatggcagtaaatttgtgtctatactctgtcactttacttttggcctcaagtcattgcagtaaagtggcagagtatagacacaaatttaggccttcttcctactacagacattttcttttcacttctactagagatattttcactttacttttatgttttgaatgactgtcagtcgtcttgagatcctaagtgaaaaagcattgtaaagagtggtaattggatcttttccccttagatccagtggctaccctattgcatttgtgaaaggagaggaggaagccattccaaattttagtgattagctttggtatgaacagcttttaaggccagctttatacttccctttggggatgagagtaataaacatagtcttctttgtattcattcatcatagcctgtacatagatatgaacaggtttctctttgatggacttatgaccatgttctgctgtgacaatgctttgtaaaaaaattgtcacttgtatattacttctccaaaaatcataataaaaaaaagatgtcaaagtgaacatgatggggcaagggaaaaaccactgcagacagactgaggacacttgagtcttgtactacctcacatattggcacagatatactgacctccatgggagacacccaacaattcttctttacccaagctatatgttacagtcacccagaaaggctttgaaacaaacacccacatcagggcccaggtacaagaaattctgatttaattgttctggggtagggtctgagtatcagtaggttttaaaagcttgccaggtgcttctaatgtgcaatcagggttaaaaaaccactggcctagtgtttaagggcctgggttttgaaatcagacagatctgagttcatatcttggctctttcacttagttactatgcaaccttggacaagttatttaatctctgtcagctttagttttctcgtatgtaaaatgaaaataatagcacttgtcttgtaggagatctatgaaaattaaattaaatgatacatttaaatgtttgacatcgtacctggcttgtggtatggatctactacacatcagctgctgttgctattataatgcacctcagtttccttatctgtaaagcaaaagagggggcactttaatttatgaaatggaggacaaatatctcaggatttcgtatagatatttgtctgtcaccatatccacagtatcctacccggcttcatttttgccgttcttacttcctacacatatttattattgttaggtacaatcattgacaggctcaacctttattatgatattttaccaataaatacttctctgccctcccccttcccaccaagattaaaaacttgaaacatacaacaaatccacttgtcatatggggtaatgtaggtatgatgggtggttgacctatgggtttaagaaataaaaggcagagttttgtaaacatgtctaaaaactaacatgcccctattcttgattgctatttttttctgccatcactcactctaagagttcagttgttggtagctttcatcctagaaaaggaaaattgttcatactctacttcttaaagattattgcaatttgttaattcccttcattttcccattttccctgatttccttctgtatgtctttttttcttttctttttttttttttttacagtcttgctctgtcacccaggctggagtgcagtggggcaatcttggcttgctgcaacctccgcctccaaggttcaagcagttctctgcctcagcctccagagtagctgggattacaggtgcccaccaccatgcccagctaattttttttttttttgtattttcagtagagacggggtttccccatcttggccaggctggtcttgaactcctgacctcatgatccacctgcctcagcctcccgaaatgctgggattacaggcgtgagccaccgcaccggcctcttctgtatgtcgtagagaagccttagtacacaatgagtaggtaacaaatttttaaagcaataatgatttcataagcctatttgcttatctccaccagtgtttaataggttatacttttcatatattttaatatctctgattttaaaaattagactttctaaaagtctccttgtatcactcttaacatagaaattatgtttttgggtggacagaaagaaattatttgactgtccaataaaagtacagatggttccatttttcttgactcatctcacagcacacattagtcaggtcacatgcctatttgggaatttttgtagtactaggtcacttgcccagctttggggcacataaaagaatattttcctggcttttaagtttgtggatcttacactgtgcctggcatggagataggaaggacatttttttccattaagctttttcactgtgttttgacaggaaaagttgaaacagagtccctactgagattttaacatgttccatggtggtaaccgtaggaaatagggaaacaggaaatttttggacagaaggaagccaaggagtccatctcagcctgtcctcacctcaaagataccagttggactccataatattatttttatctccatgtttatctaaagtttcgtatttctatagttttctttctgatagcagggaaacattgctgccaattatcatgaaaaagattgctctctaaacagtactcagttccttcttctggacaaatcaatggaaatattcattcagatattaataaagcagaattatgggagttttcatttggaaaaatgtattttagtgtttaaagagattctcaaaagatatcatgagaaaatccatgtaaactccagtgatagagaaaggtacttgtttcacacaaaaatatataaacacagaataatgacattttttgttcattaaattcaaggtgcttaaagttgcccatatgcacacacatacatgtataccttccatttactctacttctcctctaccacccactgtcccaacctttgggaaccaaaatactgaagtataaatcaactctcatttctgaaagatctataatgccatttaagtgaaagtccttaaccaacatatattgttatttttccctaaaaacttaattatggacattttgatgcatgtgtttgtttgtgtgcatttttcgtacccacaggaaacatttttcaaacaatctggtcgatggatctctattgaaaatttaccattcattagcatcatacctatgctaatagtttctattgtctttcattattatgaatgagatcctagacacaccattttccatcattttatttaaatagtgaaatacagttaaccaaatagcagtcatggctattagcaactttttgatatacatttggcatggcaacagttatattttatttctcatgtctatattaataccaaaccttaaaatggattatgaaaatacaaaataagctgttaaaaaagaaaactgctctttccagatcagaaacagtacctcacaggactggaattaacatcattatcattgccattttaaacgtaatcacctcagattacataatcttttactaacatgtttgtaaaattaggcttttccatagtccagctttgaaagataaacaccatgtgtacataagcataggtaaaatatctcatagatacagagcccataaaatgggcatattctcataaaggcaggaaaaggtttgctcaaggagcaagctgataagcacagtggtggaatgtcagaatgcctaggctctgtagttcagcctctaccactgaatgagtttaccctaaaggatttaacttcactgtatatcagttcctacatctgactcaatgtcaacttaaacacccccaacattttaataacaaaataattaagatctaaaattgttttgaagtgttcaatattatatacagatacagccttcataatgctcaagcttaaaataggaattgggatcaaattgttagaaaaagttctcttgttccaaatgttggagactgactaagtgatgtcacagcctcaaagttttgcacaggttgaccacaaaggcagagccacagaggaggagctggcttaaacagggccctgtgatggtggactatgttttttaaactaatagaagaaatgggagacactgaaatctgtgaggaagcatgtaacatgatcacgtttgttatgtctcttgaattatctaaggtttgacacaaagggtggattcaaagggcctgacaattggaagctctggtatgatagaaaggttttgccttaagactgtagttctcaaactgaattgcacctcaggaactggcttaaaattcagattctagggccatatccctagaggttctgattccacggtagttcttgggtgagcctgtgatttttcattatagcagcacctcttaaaaccacccaggtatggcccattctctgctcagcattagttctttccacttcaatacgttggcacgatggccaggcatgatggctcacacctgtaatcccaacactttgggaggccaaggcgggaggatcacctgagcccaggatcgctgatgcccttgagatcaaactgtgaattttttgtcataactagtcaatagtctagcatccagcttatgtggtttctggttatggacagtactgaaaagattatttaatgttctataaagtcctacagacagaacatttgattttttcaatggaaattctgtatctttgaaacgttctctgtttattcctattacgtttgcctgttttagtttttaggaaagaatacaaatacatctgtttggtcagaatttttacttaattgacactataggatttatcggaatagggagtcttttacaaattttgatattgttttgtcctgttttttatgcatgtgcccagatgtcttcacaaaactaaaatgaatttttaaaaaatgaacagtctatttaatgcacttaccacatgttgttatatgagaagtgtgacatttgacctaacctctctaaaacccttgaatctataagggtaagcaagaagcatccccattactaagaaatttttgtcatatgaaagaaaatctatcttatttcacatattcaattcccttgtcattttacattataaataaataacaaaccaatttggcacatgcccaccgattaaaaataaaagttgtcagagaggagaaagacaaaaatatgaattattaattataatattaagcagcacaaaaagcctaacatgaaatgatatcacttaaaaagattttatcaaaataaaaattgggcaatgatatagtgcttattgtacaattcaattgttattttaaatgataaatatatttaccatatctagtatatttatatcaaatttgatgaaaagatattttaatcatagcaaataaagaagttatttagagaatagtagcataaaaggaaagctcaattttaaagtctcacattaaattatcatattgacctagtggctatattcactgtaagatcatactcttgcatattgttatttttcaaatacccattactagaaaaaaagcaagaacacttaattagcagaaagggtgatgtttttcttttcatgatgattttggaagtttatacagttcatagtaaaatgggaatgaatgtgggatatttttcctacatagagatttgaaacaatatacatttaatactggtttataaataactaaatgtaggtttccagcagagtagagtgatttcacctcaaaaagggaagatgatcagggctttgatgaaaatatttctacccatgtcttcctaaaacagccttcctaaggaggctaggcttttggtaatttaaatgttttatttctgataaaatttcatttgtttcatgaaatgtattaaattccatttggaaacaaaaattctgaaaaaaatttccacattttgaataatctcatagaagttatccgtgtagattctgaagaaaattcttcatttgctattcccatgaatagcagttttggttctgtttagttgtattttcattttaacactctagagagcttctttgacttgtgttaagcttgcttgttccatttcagttgggtttgttcatgctgtcttgatagtttattctatcaggcatgatgttactttaccgtctcaatcccttggcagtatttttgtttttagtttttaactgaatttaatgctcttgaaaatagagaggtgggtccatatctagaaaaaaaaggcaaaaagttagacatctccattcatctttacagtaaaccaaattttcaaaaaaatgtttctctacattaaatatatttcaaacaactaagtctttagagttctatttaaataaaaacacaaacttttgtgtcatagactacttgggccctatatatctcaacatgggttctaatattaattcatcttgtccatagatttgtaactttggctcttaaaatatattctcttctaactattgcaataatcactaagcatttggtaagtgtatctatagtggtatacccagagatggtgtcccctcagtgcaggttatacaataaagaaatcaaactcggtaaagattttcattttatttctcattcttttcttatctgtagctcccatttgatcagggaacataactcctttcagtattgctgtcttatccaaattttcatccagaagtgacttgcttggcctctgtagtcttcagaggctgttcataaagcttgggtttcccttgtaaatcatgtaagtttcatggccctccagtgttttttgtttgtttctttggggctcactgattcccaccatgtacatccatttcacagctgctgtcatcagctgttctccctctgtgtgatttatttttaataacatccctttatgcccaattttgataaccattagtcccagtaaattctcttatgtttagtccttacttgaattttactttttaaaccactgagttagaacaagaaaacagcataagcagtgacagaaaaccaaatgcagaactaccaaaatgaacgcctacaatcctatctgatgaatgaggcagaaatgaagagattgctcagagaacattctggaataaaagaaaaagaaacctcaatagaacatcattccagaagggaagaaaatatagtcagtaagttatgaataaaatcaagtcatattaaaaaaataaccaaaagaaagcaaccggcttttagatattttttaattacagttaatatttactgagagctttttatgtgccaggcaacatgctaagcaacattcattcatcatttcatttattcattgatttcttgctagaaattcatgacaatagaacctctactatttccttcattttacagaagtgaaaactgaagtttagtttaactaaattatccaaggtcacacagccaggaatgtggagctagaatggaaactccggtgtatcctttacctttatactgtgataactttcaaatgacagcctttaaaaataaacaaatacataaataattctggtttgactactctacataaacatcatgaaaggcctcattcaatcaactcttgacttatacttaagtgttataaatacttgaaacgttaccatcatagagtgtagttcaggttttggaaaatggatctttccccaggtttgctagttttattctctgtagtggtgagaatcctttttggctcactctgttcctaactataagtaatgttggttaatattaagaaaaaaatcttctgaagtctttcaatataatatattttgattgaaaaataaatgagtatgtatctgtaagttatacaattattataaacaagatgagctgcttagataattaaagaggtttccattgacttatttcttggttatcaactggttatattttaaactaatatattaaattctgataatctagaactttgagggtgataaatttcatgtactggataagtttaaggcaacgtgacttcttttgatgtatgatggtttcatgataaataagctattcctcagtataaaaatactgttcttaagcctgaaggaatagtggcccatatataaaatctagtttgggcccaatgcatctgctgtatacagtggtctaagccagcaagttgataaattcagaaactgagcagcctggagccatatgagattcatactgccttgagttgcaggatacatatatattatttgatccagacatttttcatatttcttttaaacaagcagaatcctcttttcaaactaaatcttattagaaacttaacatatggaataatgagtaatattttattgagataaactcattttcaaattcagattatttatcatattgaatattataaagtcattcaataagaatataatggcaaatatacaaaggaataaaaactcagcattggattattgtattggctcaaaaatcaatgtatttttgtatggggaatatagcagatactcaaataacatggtgtcataacgctgatgggaaaaaaaaaaaagaactattcccagtgagccactgtgtgtgtagagttggcactttctccccatatctgcataagttttctctgggtagtgggttttctcccacatcccaaagatgtgcgtgttaggctcatgggtgtgtctgagtgaatgtggctgtgtgtgagtgccccctaagatagaatggcatcctgtctaggcttggttcccaccttaccaatccctgagctgctgagataggctccatccactcatgaccctgaactggaattattgattaaataattatcttacttttattaatctttcttaaatgtatgtacagctcacatttatttcttgcttttattaatctttcttaaatgcatgtacagctcacatttatttcaatgtttaatatcaaaagtgttttgatctttatttagaaacttgatgatgtttctgtgacccaaaatttgccataagaacttaactcttatttatatcaattagtctatggtaaaattgctttcattatatgttgtttcacttaaaatcacagtttccaagaacctatggatggcaataagtgaagactttctgtactatactatatggtatcaaaaaaatcatgagactgataagtagttgcatattgtaacagtttttttcaacagcttgtattccaatctgagagccttaattagaggcctgcatgaaagctgcttattcttattgtacataattaacttgtaataacacattggtctccagtgttttttaaatttatataatacatttaaatttgcatgtcatttttatcacaattgcaaattgatatatatgtatttactacatattatatatgtatttatttttttatttatttatatctatttgataatctttttgtaatcatctctttgtaagtctggggaccatgaagcatagtttgaaaaccacaaatttggttcaaacaatttttaggaaataactatcttttctttttctgatcctctattaggtaagagacaatttaactttttggggataccgtatcttgtgggttttggtatatgtgaatcatttattcttctaaagctaaagctcctgaaggaaaaggactttgtttttatttttgttttggtttgtttcctccaggagcctaaaattccgtattgtacatagacagtccaggccatctagttactctatgtgtacatcagaaaacttgaaagaggagtccaaatatcagtctcagtcctttcttctacccttccatgcttctactactacctctacatgatgccgttgatagcaaaagcaatccaatgtatatcaaaatgtcatgtttaccctacatatatacaatttttataaagcaacctagttaattctcttggcttctagttttggaagctcccaagatgaaggagggtgagagggcatagaggtagaaaagaggtagaaaagtgtaattaaatgctagtgtagacaggacagaaggaagcaagatagtcctggcaccactagtgccttctctagaaaactttcaagtctataaaagaatgaccaaaaatcagaatcaactgtctgggccacagatgaaaaatcagatcaaatagagaatgtggtattagctgtgacaccaaccaaatcacattagagcaaccggaactagaaaaacttgtgcagaagcaggcacactctgcagcttttcagccttctgtcaggcgttgggtatccaggtaggcttaggcattggagaactacctgttatgaaagtcaagccttattgagactcctgcatgatgagccagtgaggaaatgagagcaaatatagtatgctgtgaattcatagaacccgtaagtctgtttctataaatgggtaacatttcctactaacttatgtggaaaaatcatttttataatatatgtgtttacattaaaccaataaaatgtcttgtgtatgttggaacattttgcttttatgtctggtagaccatttacctcctcttcagtgtctgttggaacatttattttatattctctatttcattcctgttggagcatttatgtatgatttgtttgttacttttatctgttgatcttgccctccccatatgctcatgtctgactggcctagtttcccacattcagtgtgtgatctctagcccttcttaaatattaattagtgtaattgaattccctccagtatttctaacctcaggcacctgaatctcagtgtttttattagaactgatttgtgcatttaaagtccaacctgcatccccatcccccactgcccaagcaacttttcttgattaggtaaaggtcgtggctatgtgcatgcctcagagaaagtcttcatgggaaaataaaggcattatatatcacaacctttctcagttaaagactgaaaaatacaaagctgtcttgaatctttggcaaaggaagtcacccagaatgaataggaaaaggatgtagccttccccaggagtactgccagaagtgaaatagaaaagccatgcagagccctgtgtggagatgagagcaaagcctcacctaatcatagtacattttcctctacgggcacagtcagggactctaggacaacactttgtataaatcttctcagttgttccagtttgcaggtctatctctgaccaacataccattcatgattaaacatgagtgactctttccttggaagataacaggaaaaaaaggaaaaggagaagagcctaaaaatagggatagagaaccatatactcatgagaggatttgtcaatgagatagtcaattactaccatccatgtttgaggagaagagaaacaatgttagataactagagatgtggaaatcttctgatttacagaaagtatagaaaggcaatttatgatgatgcaactacttgctgttagtcctgagcaacagtctagaatggattattaaagcaataaagtataaaacaatgtatcatgatccactgaaagaagtggtgcttgctagacaatagaatggcttcagtaaaatgatgtctacaatatgtgatctgatatctcctgggttagatatatagacagattagtaactaatctaggcacagccagattagtaactaatctaggcacagccggattagtaactaatctaggcacagccggattagttactaatctaggcacagccggattagttactaaactaggcacagccggattagttactaatctaggcacagccggattagttactaatctaggcacagccggattagttactaatctaggtacagccggattagttactaatctaggtacagccgggttagttactaatctaggtacagccgggttagttactaatctaggtacagctggattagtaactaatgtaggtacagctggattagtaactggttgattgaccacactattaggtacaaacaaatggctcaatatcataatataggggattcctgtggcatattgcaaggatattttcggccttatcttggtcacaagtttttttcaataactggaatgaaaacatattcattagatttgcagatgacatgagtccagatacatagaaaagttgttgaatgaagtaatcgaattccaaagacattgaaagactggaattatgggctacatctaacagatgaaattttctaaatggataaatgcaagatattgcctttatattttaaaaagactagtcatgaatgacgtagcagagatatgactttccaacccagtacaagaaatttaaatagataggaacatcttcaggtataagtggccagaatggtagggaactgaaacatgtgatatgagcaatggttaagggaaccgggattaacaggaaattcaggaggaaggaatgtaataactatcttcaagtatatgaatgacagtcatctaaaagataaattatgttgctttctgttactccaacaaatagaccatcagccagtgatgaaacctacaagaataaaatactcaagtcaatatgaaacactaactttgtagcagccttctgtgttcaaaggtaaaaaataggagggtaaaaaataatatggaagatagacctagattaaatctcagttatgccacttattgaatccttgtctcttgggacatttcttgaatgttccatagtctgtttctatacctataaattggctttaagtaattccttccttacaggttgtgatgagataggcaccatataggcactgatacaggcaccatatcagtctgtaggcctaccataacaaaataccacaaggtgggtggactagcaaacagaaattggtttctcacaactctggaggctagaagtccaatactgaggtgtcatcaggtttggtttttcctgaggcctctgtctttggctgcagatagccttctgctgctgtgtccttacacagccttttctttgtgagctcaagagaacctctgatgtctcttcctgtccttataaggacgccagtcctagtggattagagtgccaaccttatgacctcattaaaccttaattacttcttcaaaggccttatctccaaatacagttggtaggagcttagggcttcaccctatgtattttaggggacacaatcagcccataacattgcctaatatccacaaatcctagtttcctaagaccaaggtgtttaagcatagacagctaccttacagggatattttgcaggatactgaagccataacccatttatgcctagtgttccactattggaatgctaagcttgtggcagttatgtgtatcctgttgctcaaggtcatcaccaagttctgatttttcacacatacacacacacacacacacaaaattgcaacatttggcataaatgggttaaacagatgattgtcatatataattttaatggactctgctaacactgatattctgtcattataaaaataaaatctttggggccagacacagtagctcacacctgtaatcccagcaccttgggaggccaaggagggaggatcacttgaagacaggagtttgagacaagcttgggcccccaagcaaaaccctgtctatacaaaaaaaaaaaaaaaaaaaaaattagccagatgtgtgatcccagctactcatgaggctaagatgggaggattgtttgagcccaggagtttgaggctgtagtgagctatggtcatgccaccgcactccagcttgggtgacagagtgaaaccctgtctctaaaaaaaaaattaaaagaaaagaaaatcctacatatagcatcaactctgaaattctgcaattctctaaaaatcctcgatagcaaggtagttgttaaggatataaagcaattttctttcaataaatgttttcctttagtattcaaaaatttaatattattgcactaatatttacttacgtactagacctcccttgatttctgcagcccaaattcccaagatggcttctaagtgaaacctctgtctcttgtgagaagacactgctttgtcaaacctttaaatgcctcagaagatatatgtataaaagtagagggagaatataattatcttaaaaacaaatttaagaaaacatagcaacaccaactacacaagtaaatgcatgcataaagtaaaaataaaaagagataggttaatttgttccagaagtttcaaagtctcgatctatagcttcgagacttttaaattcataacaattaatggaaaatgcattttgttaatacatccattgctgttattctctattttactatgcatatgtattgcctcttatttagaaactaatagtttaagctgagactatgccagaatctagctattaatgttggatagtcttttagtttatctttcttgcaaagagtatgttagtgaaaaatgggactgtgttgtctattttggtgacaaatgggaccgtgttgtctcttgtgtccatgggtagctggagtcagtttttttattttttatttttttaattttaagttcttgggcacatgtgcaggatgtgcaggtttgttacagaggtaaacatgtgccatggtggtttgctgcacctatcaacctgtcacctaggtattaagctccgcatgcattatctatttttcttgattctctctgcccccacactgccctcccctgaggacatgaaaagacacttctcaaaagaagacatacatgcagccaacaaacctaagagaaaaagctcaacatcactgatcattagagaaattgagtgacttttaaaagtcagtattctacatgaatgaaataacacattctctctcttattctcttgacagactaagtcatgttaaaaagatgcacgtcttctcaaggagtatgtgctttctttcagtctaactaaaaacagaaaacctgaccactattcacggttttatttcttggcaatgaaatagcctcctcttgagaggggcagttactgtaactagacgatggttacaactgagagtttagtctatggtctgatggaaagaccattacatcttgagctgcattatctgcattcaagttctagctcttccatttttttactttgggcagttaacaaattctccaagcctatccatgttatgtaaaactttatttgggcttctttccaggtctgcacagtttgacccaatgtggatatttaataaagattaatttatgtcctttttctctgatccttaattctttcaccttctaatgggtatactattaatactttctctacttacctaccccacaggatttttgagacaatcaaataacacgtttgtgagaataatttataaactgtaaaacaccatacaaatgcatttctccttcttatgagtgttacgagtggatggggatgcttaactagaaattgaattgggacctcctaggaatttacattgaaactgtttcctaagagacattagaggcctcatgttgttgtctatttaaattgcctgacctaatctgtacaatgaagatatttaacaacaggtattaaatttgattgtctatttttctgtggtattttccagggagcacaagaaagattatttcctttccaatttttttttcctgtattattgggctgctgtctgttctcaaatatactgagacaaattcttatcctttgtaactatggggatctgggcccatggtgcttactatcattatttctgttgtatttgtggtaattattgttattattattaattatactttgtaattatatagcttcttattttaaggaaagataaattgctagaaaataaacaagctcctgttctttagagatttttggagttttgaacattttaaatccaattttgaccttttttcacaaagatttctacatgaatcttcaaacacaacattttttttgtctgccatcaaaaataaagtactgacttgtgagatactgccctcgaagttatgcatgagaaaatagtctctcagagcatttcatttcctctttctgccttttaaatgatttcttacagtatagttaccacatagtggaagtttgttttggagaaagattttgaagcagaaggtggagatgcttaaacagtggcccatgcctaggtagaaagttctcattgcccctgcttgcttctgactgccttttgaagaaaagaaaaaggtgaaccaaggtgagatgatattagtttgtggattaaggggcaggcagttaagtgcagcccaagtacaaaatgttcaacatgaaactgacagaggctttttggaataaaaattccaccttctttctttagtctcttgggtctgttattttgaattcttgaatatccttaatagtgattaagttgtcttcaagtttccaggttggtgggcctgggctccttttgatcatgggcctcttcattcccacagttaaggacctgaacccaatagagggattagaaagccaaagaagaattttgatccctaggtaatcttcatgtaggtttctctatgtgttggtatgaaagggagggtgaaattttataggaaataaagagggctattccattatatggtgactttaggaaatagtcgtccaactctttcttatccatgaaactcttcatccaactcttctcttatctcactgactttttttttttttttttttttttttttttgtgatggagtctctctctcttgcccaggctggagtgcagtggcacaatctcggctcactataacctctgcctcccaggttcaagcaattatcctgcctcagcctcctgagcagcggggactacaggtgcctgccaccatgcctggctaaatttttgtatttttagtagagacggggtttcaccatgttagccaggatgatcatgatttcctgacctcgtgatccgcccaccttggcctcccaaagtgctgggattacaggcgtgagccactgcgcccggcctatctcactgtcttctaaagcagtggttctccaagtgaccagcagcattagcattacctaggaatatgttagaaatgcagattcttaggcctcactttcccctactgaataagaaactttgaggtggaacacagcaatttgtatttgaacaagcacttcaggtaattctgatgcatactaaaatttgagaaccactgatctaaagagatattgaattccactgagaaaatattttgacaattaaaaattctaccagaaactacaagtgatttttggaatccagaaccctctgttgttctacttcaaatttatctttatggcttcatcctaaactgttttttttaacagtcgttaaacactttttaactttgacctgcgattcatatcaaaacaccccaccctgtctaaaatgatctttgttcctctgtctagccaaatcctctctctcctgcattatccattcaaatgtctcttcctcacaaaacccttaccagtcatgccagcattctctcagttttggctccctgtaactctcagtgcctgtaccattcaccttttaccggttacatagtcttatctgtgatatatcttgtgttactaaaataaactgtcaactattataataaataataggttacatttattcagtacccactgtggtcaccacaaccccctcagtgagttactgtgcctgacttttgcagatcttcggtagcttaccctgcctcacacagtatgtactaaaaagattctccttcagccttacacttggccactagcctatattgttgtataatgctgaaaaacttttctcatgttgatgccttattttctccccagctcaattttatgttcaactgcaattagagaccataattctcctgttatttgttacacaataacttttagaatatagagagttaatgcacatttgttggtatattgtattagaaactctaaacacatttctgggatttcgctgattgggaatgaaaatgtttaaatttctccttagatccagaacagtctccatgtgtaagttgagtatattcattttagcgaagtaatcaattgcatttaaaatattcaactcacaattatatattgactttcattatcaatttcgattaatgcgttttgaaaatactttattctacaatgcatttagaggaggaaatagctgcttttgtttattcaaggaatttaccaattttatgaaacctgtttattattttgtaagaagaaaatggatgagtcgatagcaaatctgacccttgtctgtatacttacatgtacccagtagtgatgaaaagagatgaagataatgttagtggctaaatgataattgttgagaaggcatatttaattgaagagaaatagattttttaactctgtgtgcataaatatactctataaacattttgtatttgcacatggtttaaactcatctaactgaattctgacttaaggaatagaaagcatggtctcttccaggtcaagccacactgtagttatttgggggataaatgcttggctaatttatattcctttataactgtctttattaaagtgaagacccttgaccctgagtcagaatcacctggatggttcctagactccactcctacaaactgaatcagaatctctgggattggagcccagaaatttgcatttttaatgatcatttccaggtgatcattaaaataaaattgtattttataaaatttatttaataaaatgtattttattttatggctcaattaaatgtgaaagccattcctatttggactcactctctttttctttggcaaatcaaatcttccagaaaactgatctgtgagtcaccaaactgatagttgttaagcatagagtctcagtgacaaccttaaaagtgactattgcaatttccttcaatagacttaatttattgagttctgatacttttgtgtgccaggcattctagttaattatctaaattaattaatataaaacctaaatagctctttgagatacatattctgggccgcattttaaagaagggataattaaggcttagagaagtaaatatctaggccacccaactagtagttgaattcagtttgaccctagaacgtgtattcttaaactctgaaacagaactgaaaacagaatttgaaataaagtcttctaaattctgcctctctttctaaaaaggcagctgaatagagaaggggttaaaatagatgacagctaattccaagtttatgtccaaactctgagattctatgatgttagtcaactgtcatcttaaattatatggttggtagctatagtgttaccatgtgatgagctcaatcagtaaaccatcaccttcaatgttatcagagagaacaatggaagccccatcaacagttacctgtctgtttttacagtcttccttttcctctacttcccttaagaaacccaagtatatctttgggaggccgagcggtggctcacacctgtaatcccagcactttgggaggccgaggtgggcggatcatgaggtcaggagatcgagaccatcctggctaacacggtgaaaccccgtctctactaaaaatacaaaaaaaaaaattagccgggctcggtggtgggcgcctgtagtcccagctactcgggaggctgaggaaggagaatggcgtgaacccgggaggcggagcttgtagtgagccaagatagcgccactgcagtcctgcctgggcaaaagagtgagactccgtctaagaaaaaaaaaagaaaagaaggaaagaaacccaagtatatctttttctatgcaaaggctactggaataagctttttattattttattgagagatctctcacaataatgtgaggctaatttctctgaacaatggcttgttttaataaatattttgcaaatacagctaatacactgtgtggctgactctggtcctcaactctagctgcacattcaaatcacttatggagttcaagaatatataaaatcttgtgtctaaaacctagagattccgatctgtgagtgtggcctggagtggaggctggaggctgattttttacagagcttcacaggtccttctatggacacccaggattgagaatcagtgatccaactcatacttgttaaagaatttggtgatatcatatgcattacaagagtgattgaatgaaacaaaatctctatataagtcccagaatgagtcctttaaaataaaagtagaacctttgagcctctgaaaagctgtcgcttgggccatccaaatattcatattgagtctcagataatgaaaagtcacaaaattagaagccattagagcatggtgttaagtggaattatggaaaaccatttgtaaaatgctgtggggtttggaaggacctgatttttttcacagacatttttgtaatagaaaacaaggtagtggaaatggcagcatatttgaatctatttgcatttccttatcaaaaaaaaaagtaaaataaaagggaagggtataaccttgcaaatgtatcttgatctgatattatttttgcaagttagacagatttggggacaccagtcagccagattcagggctagctatcaaatcagagctcactcttcaaatcccagcattaatcggaatgataaagagctacgtttcgattaatcctgccctggactttagacgaaagaaactgcagtttaattactgagtgaaattcacttcatctgatctgcctgtctttgctataatgtcataatataatcagcatcacccccacctgaaacagagctgtgaagtccaaggacctgtttgattggaagaaataaaatgatgcccagacaacaaccagccacagtgcagtaattactcaaaccttgttttcatcggtatgtcattctctcattggcttgtcatgacagcaactgagaaaaggatggaagagagtgtgattgaaaaggagtctgacctgatggaagcagactaggtgtgggagggaagagccaagctgtataaaatcttaagggtaattaaacttgtttttttctttaatatgtatcccactggctgctactgatttctcaagtccaagttaaaccattcaactgatctatctccctgcaattaaaatctcttcttcagttgaaattatagtttttactttcaaaataatttattttccttttgtaactggaatttatttggcagattttttttcttaggtcttcatgtggttttgtaagttaaacaaagagaaaggggttgcagattttcttctgtcagaggtaacagcctttgggagcattccttactaggtttgcatacacccattgcctttatataaaaacactgaatccagtaaggtagctagctttcctatgaattattaccccatattacacaaaatgtttaaagtaactttctgtatgtcatgtagttagaaagggccctgagccaggatatgaaccaatatttgtctgactctgggtcatactcttttgacttttacaccctccactcccttattctcacttattacaattaatacttctccagttgactcattcatcatgttattgttgggcatcccctatatgcgaagaactgtgctatactccagatatacattagtgaaactagaaagaagaatcattttcaaagagctttccggtttggtggttcagttgcttctgtggcttttattgtaaattgatactttaagtccaaaaagcaattggaccattaggaacaaatgtacaatgtgaagtcaagaagatcttctttatttccttctttttattcataatataacccaaaaatctcagaattgagaatcccaagaatcccacgaatttattgctcatatgtagtcagtcatcaaattatatcaaatcttgtcatatataatccaccaaaagatcccttgtacctaggaaaaacagtaagtgtgggggttaggagaacaggctctggagtcagattgcctgggtttgaatccaggcttcaccacttactaactgcataaccttgaaaaagttgcttaatccttatctgtaaaatggaaacaataaagttacttacctcttagggttagcatggagattaatgggttaatctacataaagcacatagttcggtgcctggcacagagtagaactttagtaaatattgttattttttcctccacaatgtctctagaacatgttatttcctgtacatttctgctgacactaccgaagtcagatatttatcacatagtacctgggttgttgcagtggatcacttctcattctcttgctctcacaagctcgcactctctctctttctctctcattacctttatgctctccctgtttcagttttttctgtccaccattcccaattatttatactagaatatcactgtgaccatgccagtgtcctactttacaagcctttaatagacctcttgtgttcacagaataaagtggactactcagcccattattcaaggaccccgtttcgcattccacactcaacccatctttccagcattgtttcctattacaattccaactaacttgtttatttgctgctcccaaatacatatctcaattttctgcttccatgctttctctcatgcccttcacacaacttgaaatgtcttatcacctcccaaatcttacatgtttttcaaagtataactagatttgttcatcatactgaagctttcctttgtcagcctacatatcagtgatgattttctctctaaacccctattctgaatatctgaattttattgcataataattccttctgggcattatcccaacaaatagatattaaatatgtcaggcacaggtcagtgtctccatacacatcattatttacccaatagcatctatcaaagaaaatcaaacatagatatacaattagtatatgccaaatgaatacatggtctgaattggaagtttctttccttgttctaaacactttttttccaaaaaagttactccaaatttagccctttatttctactgattttctaaacttccttttgaattattttgatgtctccctccttaatcctctccaaaaatcactcttataatgcctttacatttccacagtcatcatgctgctttcttacttggcatgtggatatggataaccaggctgctaatggattctatttcctctgttcaggtttattctgcaccagttacgtcaatggtagagtaatacttgcatgtctatagaacagaaattatagaacccaccctttttactttttgtggttgtcaggaaagcaaaagatattttatgcaaaaatattttataaactgcaaaaagctttacaagtacgaggtgtcatctatatttagataatatatttagatatatatttaaataatatatttagataatagagactacaccttgtacttgtacttttccaataagcatgtattcatgtactagatgtataagaaaaatatcaaaagtaatatatgataagctatatcatatttcttgaatataaacaatatatacatattatacacaatatatacatatatacattatatatattatatatgtaagaattatttctcctacatttctatatcttcccttttttcattcaatcctacacctctcttgagaaacttgcattatttggcctcattatttctttagatctgccgggcaaatgggagtcttccttgaaagctactcactgggaggatttttttaatgacttccttaaaaatcagcaagcaggactgatctgatatttgacatactgacaggaagaatcttaacagtttctaaccttcctaaaacagcattaaaatacatcagctttaccctgtacctcagatatcaagattgtgcgaattctctggccatgtggattttcttgacattttttagtcaaaatcctaaccagagaacaatatttgtagttcagcaattccggtacagaaaagccttctgacttagtctactgctggttccaactttttcttacgtgatatggttctgttaatcagggagagaattgatggacagttagataaaggcttagaacttgcaatcggtgcccctaataacccaatactggagggagacacttcagttttgttttattgttaggaaacagaaacaggacaggcagagcagccttcatcccattatttctagtggaagagggaccccagaatgttcctcatgatattcagtggcaggcaggcagtccgctccagctagctttgtgttggatcttttagctatgtccatatcattgaggttcaaacctttattgcacctgaattcctgtggccattatcaatggattcatatctccatgaattttcttttccttaaggtctcacctcattgttttatgttttgatattatgataagcagcaggtgtcctccaggctcccttcttgcttctatttcccccccctgcacaaccccctggacttcctacacattatccagctaccaaaatgctcactttcctggctgtgttcctcctaaagcagctaatctttacttcttcttcctggccttttggctccttctgcttgtgtggagttttgagttaaatttttcgagttaatatttaacctgtgagataactgtttacaaaattgttagttgataatcagggatttttttcctggattaatatggttaaagtttaacttagtggaacagctcacacacatacaaaataataaatacatatgtgtataattaaagtattaactctgggaattttgctactatgttctcatgacccaaaatggagtatttgttatagtctagataaaagaaaaaccttggttaagagtctggcaagctgactctgtggaagaatttaagcggaaaagggagccagagtctactcctaagtggcaagtggcaggcaagtgatagaaacgttccttttttttcttaagaaaatgatctttattcatgttatttttattatcacattcaaaagaagttattgggattctctccaaaagtgggtttggatatattttggctttgattatccttgtaatatcttgcgatattttctcgtgtcagtgacctttttatatgtcacagcgcgtggttgtatcttagagccagatgtgaggaaagcaatccctgtgttcaggtacttccctccactcatgtttgtaagtcaggaatgactgttttttctcttgagatgaaagtgaactttaactccatctgacatcagaagatggagtactggtagacttagaatatatcttgtattcttaaaggaagtcttcatgcttttgctgtgggtagggggaacaacctaacacagaaaacatattcaggttactttagttcacttggaaatggttttcgtatttacttcttgccatgtagacctcaaagaacaagtgtttgaagaaactgggtggagcaattaagtggatctaggtaaatgatcacttatgaattttcaaaagtagttcataaattttgccatgaggtatgtggaataaaaaagcttcaagccaaaccaagaataagattttctactcttttttgtatatcaaagtcataaaatcagaccatcaaaacatctgacagtccactgtttttccaaatatactgtgtttatcccaattcagaaataagaatgaattgctagtaacagatttcaaatttgatgaggcttaaataggcttaagtgccctgtaagatagtagagaaagttgaaaagaggggtatcccaaaagatattacagtttcgaggaggaaaagaagcggttatccgtgttaaattgttgccaagaagttgagtcagatgaaaattaaaatgtgaccattgcatttggcaacagtagatatggtagagtggaacggataaaagcctgattggaatagattaagaaaagaatagaaagtgaagatacggtaataactaatacggacaatttttctaatacattttgttatgaaaggaagaatcaaaatggggggtgaactggagggagtcttgggatcaaaagaatagcatataaatatacacaaacatggtaggttttgtttctgtttttgttttcttatgtggcattttgtttatctgcctccccagtggaaaagcaacatggacaagaatcaaagcctcaaatctctagtagaaagagacatggaaaaggtaaaatccatctggtaaaatgtaaaagggactggctcagattcaacagatcttggtctacttaaagttctactagctactggtaatgtgaacctcaataacctttctgtggctatcagtttgcttatttattgataacgtctaaagttcctttatggtattctgtatctatgaaaaaggaaaaaagcagacacatttcataaacctctctctagtagaaattagtttatatcattcacaattttattatttagaaaacacacacatcttgttagttagccctcacaagaatgctatgaggtaggtggttagattgttttgttttaatggaaaaggaaaccaaggctctgcaagggtaagtaactggcaaaaccacacagtgtgcaggcagcagaggcagaggtcaacttcaagttttcagaatctaagtagaatattcttcctaccatgttctgctctacatacacctcccctgtagccttttgttttgttttgttttgttttgtttattctcctggatcttcaatgaataccccccactttttttcatttctgggccaggtttccattattttcccttctgtgcattccactttcctcagaactttcaggtatggccacccctataaatattttcatttcttcataatacagaaccaagtgcataagggttgaaaatctatattaagttcataggaaaaacaatcccacgccaaaacattttgccagactagtaaaattgcatttcaaacaacccatgaaaaatcaacgctgtaaccacaatggccagtgttagcagtggaaaccttctcataatatcttgtcatttggacttacaagcttttaaaaccagagaatgaaaagggaagagcaaaaaggtaggaggcaaatatggcaaaggggaagtgggagaagagatggcacaggaggggtacaagtgttgcttagtgtagaccctgcagaccaaaaattattgtgtttctaacactattgatttttttcagcagctgatatttcaatctgggtgcagtgtgtctgtgagtctacgcacactgtcaagaagaaatatgatagtgtcttaaaagattaataatatcgctggtcctctggaggcctgtcttaattcactggcctgttccctggcatgtactgtaatttatctagtctgatttgaatagcaaatggcaatcggctgccattagggaaatgggcatcattcttattgatccagcatgggctggattttatttaaggagaactgcaaaatgttattaccttcaggaggagaaactgaaaacagagcttttcccgtgtgtatttcggaaatgttctaccttaaaaaggggggaatggattgtggatttaggagaacggagagagattatcatcctgttgtgtgaaaagggacatgtacaggctgtttacagcataattgtttatcagcaggaaagaatgctcatgattataagaggccacgggcctcagaggttagaacattggaaagatagtctgacctgttccagtccaactttgtgtaaagcctctagttgctcagaatccatttgtcagtctgtaaaatgggctaaaagaatctgttagcaatgtgtaagctttgtttagcatttgtttcacatcctgggagtcttggataaaggatgttatagaattaaaaacacacacacacaaagatcttatttaatactgtgcatgttggggggtagtgtccagtatttattattgctcttcattcagcattctggaagggacaagttatgtgctgagtgaagcaagacgaagtaacctcataattctcattaaccattactatatctctcaggtcaacgttgcatatattgactttaacgttcacctgttggggacaggtctaagcctacacttttaccttgttttactgaataaaggaaagctgtcagtgttattgtagcaaatgtgggagacagacttgggtcttactgcctaccccacactctctttgctgcaagaataggagctgaatgtaccatttctctgagcttgatgcacatttcctgtgaaggagcgtgcacataccttatccctaaccttccttaaaagcctcccggaggggaaaaaggtatgacaaaggtggctagaggaaggggctcattgctaccgaaattcttcttcattccacctcgggttgttagggaaagaaacgataatgtgctacaggaaatggccaagtataaaagcaataaaataaattgaaaatgactttgtttttttgagcggcagtaattgctatatgttgtgatgtttgcataaggaattagttaatgtgtagcagaatggcatgtgatactttttatttgcttgatgactatagtctctgagtgaatgacttattaaggttaataaagaaaaatttgcttgtgacttgtaatgatccaattgctagaatttagcatccccttatgcattgttgcctaaaggggagaaggaaaaaaacctacacacattaatggccgactggctatgattttttatagtggtgtgagaacaaaacaatgtcttctaaattgttggtctgtctatctttctgcctgcctgggcaggaacgttatggctttcttaattctcctgtgtgatttatcatcctaaattcattgttttgcataactctgctcaaaatgaagaaatgtcattattttgcagcgaaaaagttgtcatttgcataatgcctgccattaattattgtgagactaatgcagttgttgatatttttagggcacagtggtacagcctgcaccttgtataatgtcattctgaaaacattggtagttaataggtgccacaacattgcacacatggaaaagaagatgatgaagaagaaggggacacaatggaacaggctgtgatctttatttagcttttttttttttttcctgaaatgcttggtgagagaagactataaaaggaagcgaatagagcaggaagctgtgacatccaagagaacaaagggattgaaaagcagaggttttctatttaggctcaattagtgtaacctgggcttcagccagtttaatggaggaagtcatgtctcctgtgttttggcttacctacgtaaccaaagccttgagcagaatgtagagttgggcttttaaaaccatcagttagaataaggttttgccctgaagcatgttcatctcatggaagaattctcttagctgggcacttggccaaagttaagaggacacaccatggtttcatggaagaaaaagctgaagactatgattttcagattttgattaatcacttgtctgtacttcacttatttcagtatttctgtctaggatgatagctttcctttcctgcaaaaagcagacggatatagtagtagtatattagagtgacatttttttcctctgtattgtttgcagtaggtctaacttttgcatctgattctttagggaaagcacctaccaaggcttcctattacctatttcacaggtaagtgaaagtcagttataaaaattcgatcagagatgaaactcattacactgagcctgggaggcataaatattacaaatgtaggtaactgttgatctttttagtcatgggagcttaaaaaaatggacacatcaaatagaattttttctcctaatttcactgtttcgtgtatattataaatttagatatttcttttttatcattaaatttaaaagacataaaagaaatggagcctcaaaagtaggtctagttactgagactgaccagagatacttagaaagaagatattacccttcaatgttcaaagcctggcattgtaatctctttggaaaatgcagtgtttttcagactctaatccagattccaatggctattctgtgcccaaagaccaattactattttggagttctcttaaagccagatgatgctttgagggggccatcaggaccttaaggagaccacaggggactgtctcagtttgtcttataataaatatctcggcagaattagggctgggatagttctgtagatcttgccttacttttggagtttaatctttatgtgttcagttttgggatatgtaaaaagccggcattttcagctaggaaaattttaatttctgtgttaggaaattttaattctacggggaattaccacacttggagttgtaaaaaacagatgagctcatgcgtcaattgagacccatctgcattgctgctactcacttttccttttcttctgaagaaaatgaaattgtcctaacaccccaaattaatgtatttgactataataaaatcaatataagcatacgatataaaaacataagaagtccaacatcgaggggaaatgaagagaaaatgaaacaagggatttgcacttcatatggtatactagtacagactgattaattcttaatcatcttataacctagtaatgcctagttatctatcatatattctacatgtacctatagatcctacatatagatacatcggaatagctgataaccagcttagcaggttataccattattagggtgaccaacttgtcctgactagcctggagctttctctgtttgaacacggaaaagctcacatccctcctcagtcttggacaaaccaaggcaattagtactataaccatgatggatacttgtaaggcatactgatttaatagttacattatatattttgtcacctcttctattgcttattatatttgaaaaggctttgatttcgtgaacaaactgctatatccttttatgtagtgaacaaattgagccctttagtgaacaaactgaactctttttttttttttttttcgagatggagtttcactcttgttgctcaggctggagtgcaatggcacgatctcggctcaccacaacctccgcctcccgggttcaagggattctcctgcctcagcttcccgagtagctgggattacaggcatgcgccaccacacccggctaattttttttaatttttagtagagatgaggtttctctgtgttggtcagactggtctcaaactcccgacctcaggtgatcagcccgcctcagcctcccaaagtgctgggattacaggtgtgagccaccgcgcccggcctgaactcttttttataacattaattttctaaagaattttatataactgtaagagaggttgagtaaagaagtgtagattttcatgcattaagtttctagcactttgatcatgtatactgtggaaaatagcagtttcatagtaaataatcaccttcaactctgatcccctgtgttcaggaactaaatttagagctcaagtcttatacagaaacagggtagaaatccatatgttagctggcatgattttcatcacctaacatctgataatcacgtcatactggcattctttaatactcactgatcgctgccaggacttctaacttctctatcctttgctttggagtttttcttccttttacatccagcactgtactaagaacttgggatacaagatggataagacatggtccttcacgatgagtttttcagtctaatctatgaaggaaaattgcaagaatgaattttatatagcgcatcgtcaaagcttagacatagaagaatagcacttagaatgttgtttgcttcatggattagtttgttcatctgtttaataaacatttattgaagctctactctctgctcagcaatgttcttgacattgtggatacaaagatgaactatacttggaactttcacaaaataaatagtataaaagtatagctcactcctctccagattgagggttcatcaagcataagattgccatgtcagcatttgatgccagtctaacttaccaggaccagttgggctgggaaaacgtctcctttataaactcagagatactatttttagttaactatctaatttgacttactcctcccaagaagtttattataagacatgtgagctattgcatgtaggtggtttcccagactggcctgtgcagtcagatggaaagaatagaggcctctgggacaatccagagaagccgctgcaccatgcagaataaagatttcctatttaaagtttatgtgactgggatgagatttataagtactggaacactttattcatctacttattcattcagtcatttaatagctatcaagtacctataatgtttcagacattgttctaattactgggaatatagtgagaaattaaacaaagtttcctatgaaacttattttatagtggaaggagagacagccaataattatgtaaacaaaaaaaaatcattttaaataatgatcagatctaggaagaaaataatgcataataaggaggtagaaaatagggatatataatttagaaagtgctatttgaaatagggtaagtaggaaaggtctcaccgagtggaagatatttgagcaaatatttaaattattagaagaacctaagcatgtggtgaccagcaggaagaacattttagggaaaggggatggatattgtaaagactttggagtaggaacaacttgaaattttccaggaagagcaagaagaaatgtgtggctcaagtggaccaaagtaagaatgatcatgtagataagtagggaccagctcacacaggccatgataaagactgacagaaagctatagaggatttttttaagcatgtatgatctcatttacatattaaaagagttccagggctacactgtggagaacagtctacagggtcagggtgatacaggaagagcatgtagtagttatcatagtagcccagttatgcaaagggcaatggcagtggggaggggatgaaaagtggttcaactctgcataacttgaaggtagggctgacaaaagttgctgagggtctcaatgtggttttacatgagagagacatcaggtgtgatgaatttcaggcatttcaccccagccactggataaatggcaatatcccatggagttgggagctataggggatatggagaaatgagcagatttgggaaagagatgattatgagttagtattggagaatgttgaatttgaaattcttttccaaataaagagatgtagtaggcagttggatacatgagacaggagttcagaggaaggattaggactggagattcaaactctgtttttatttctgcatatgtattttctttacagcataagcctacagggtacgaagaatgaactctgagaatgtttggaggtaaatatacatgtcccatattatatgatgatgaacatgcaagtactggtctcaattcagtctgctattttttaaaattccctgatatacattgcaaagaggtaccaacaaaaccatgtgaacactttctaagggcacatatggtttatgatcatattgagttgtaagacaaacaaattattgtttcatattgatgtaagagtagaaataggggaagacacagattctgtagtttaatgtgtaggaaaaatcaatgtgaattcataggaaggtgaaactctaacccattgttggaattagtgaagatttaaacaggtagtaaggagcagtcagggcattcaagatataaagtcataagtagattgtacaaagacataaactagctttctctttatgacggagcaaggatggagaacaaggacaccggtctagcatcagcagagtgtatatgtttgtgaagttaagggagatgaatttataaaagttggctagagctaagggatttgaacttccccagtagcccattggttctcacctctagtataattcagaatcacatttggagctttcaatgaagatgcctggatattacttctggaagtcctgattataggttatggaaaggccctagcacttgtattttcaacaggcagcctattccagaacatttgcccctcctaaagctgtggttatttactagaattaatagtcctgtgtgagtagcatgtactggattgataggtagagttgtctctccctgcaccaggtgctcatggatctttactccagttcattcttaagtgtcatggctcggattttctccacatctctgcctaaattttcagcctttctctgttttataacttggaactaccttggccttttaaggcttccttcattttctttctatttgtggtctcttgcacaattacctatggtcaagtgtgggtgtaggggtgagtaagaaccatgagaggggtggtgtctcttacaaagaactgtgagaatgagaagaactatgaaactgttctgctgcaggcctaaataatataactaattaatactatggaggctgaattgaaagcaaaatataggacttaaagagaaattggtattttttctaagcaggaacctaagattaaaaccacagatttaataagattttttatttgtttaattggtagggtatcttttataactacatagtcccaaatacttaagattttagaatgcaacacatacatctataaaaacaggagaaggaagacttctagagacaaaagagtgcctacagagggtcacttttaggcctttagagaaggaaggttggtatagatgaatattttaagtaatattttactatgaaataaatgtgcttttattatggaaaagttcaaataaacaaaaattatttataatttctctacccagaaacaagcacttctagtgttttctggtctttttgcactttgtgtgtacacaactatcacttcttaaacaatatttaagttaacaatatttaacttagcaatatttacttaaacaatatattttcctgtacatatattgttggttatatgccttttcacttaacagtattccaaaaacatttcttcatgtaattaagtggtatctaaaatatgatttcttaaactgcatagtatttaagtctaggaatgtactgtcatttatttaatcaactctctattgtcagacaaggttaccagtctttcacaattataaataatgccatggtaaacattcttgcttctaaatctttgtgtagatctttgagtaattcctttagatacattcctagaggtgagatttctgggtcaacagtcttcatatattttttaaatttttgatgcatattgctaagatgccctccagagcattttgccagttttattttttcggtggtaacatcttaaagttttcttccaaaagtgatttgattcaaagccatgctgttgcttttctctgagtcctttctggtccaccagttatagcagacttaatttaactcttaccttaaggttaacacttagagtaaccaaaacatttttgtagtcatttatgctgcaaatgagacagtttacagaatataaattgacagtgagattagattgcgtttctttcttatgcatgttctgtacaagcattctgcttatcctggataacaaacaaataacaaaaagaaagaaaaaaccttacctctcttgcttgtcctaactgaacactcacaatgcattaggcattgaactgaacgtggaggagatatgattcctgctttctgagactttgcaattccaagtaccatgattgataaggtacaatataaatagtgggcttctaggacaatgccctgtggttaaaagtaattaagttatatggtgccagcagactacaggatacttgtgatccacatatgcaggtggattgtgtgcatcagtcatgatatctgtggaatctgagagacgggaaaggcatacctgttttaactccagaataatatagagaactcaaattcctgcccaggcaaatagggataagttgtagactgcaaatagaagatggattgtggggaggaaaaaaaaatctactagttcccgcttcttccactgtgtcccctccaggggacactcataggtcagggtccttcatgtggtagctttgagttcccgacattttcaaaactgttctagggaaagggtcgggcatgtatatgaagactattttcttgtgagcacaatgggagaatatttgaaactgggactcttgtgaaaaatcagaaaggttgccagtgtacctgggccttcctattgtcttgaagtactgtggtggactttgtcatgcttaaaggaggtgtgattgggggtagggaattgcttgactgagaattaaagagtgagagctcctgtccagttgcttaaactgaaaaggatttctgacacatatttggttagcaaaaatgactgtgagttagtgggacaattgtagcactgatgtaaaaattccaaatagtccttccgaatagatatacacacatttagaaaatgcattataaatgacatatagcaaaaatgtaaacaagccatttaataacattttaatgcttgattctgatctcttaattaaaatgtgcataaaagaaaacaatggtggaacatctgtgtgtgttattgggatagcaggatttatgctgcaccctgggctttttgttcgcttttcagtgtgtgtgaatgtgggtgggtttcctctttgagccacagttacccatttgacccccacagggtctatattcccacccaccttctcttggctgtagttgcaccccctttttttcccctcttacttaaaatactgtatggtttgttctttgcttaaattaaactactctcgtcatttgatctgaaagccactcttcaccccacccctctaacctgaaaccgtgacctaaccctgactcacccttgttatctcagcagatgtacacagcattacctaatgttttggcctcagtgaataatctcaaagagctttggggaaagtgtggccttttgtatctgtgaccttgcagcagttattccttagctggacactgtgggatttagatgttaaaaacagactttctactaacccctgctggtgatttctttattattattactgatttggaggatgtatctctgaaccccattttgcccaactgttaaatgagagtgccagcaatcacaaaaagtcaagggttattaagtgctttaaaatcgtccactgaaaatgttacactgtgatatgcttttatttccacttttacatggaacacatgtgatcaccaaaaagtttgtctttgattaaaaaagcataaaaagtacctcacatcttctgttactcccagcagatttatgtatcattaatacaagagaaagtcacacacaaatagccttcttaaatatacaataattaatatttaatgcccccttttatgagggggtctttgtgctgggatgtctctaatcttcacaacgttcctgcaaaataggtggttttattctttattccacaggtgatgaaaatgaggtttcagaatcatttaagtgatgtgcctacagctttattgttaataaatggaaaacctgggattcaaactcaagtctgtctctctctctctctctctttctctacatcatattcttcctataatatcatgacctatatgggagtatggtagctcccatttcctatagaccgtggctagatggtgttatgaaagagttaagtaaaatgtgccatttgtgacaaatgtctgaaagttgtttttataactaggatttaattcacaaatgaagagtaattatcaatatggcacagatgaagagctgcatgtatggatcagtataatttctgttctttggcttatggatgcagtatgccccagggagtttcacaaatccacatgacatctcccagtgctgggttctgggttagctggccaaagtgtaaaattcctccgtgttcggatggctcacaactggttactatctgaagagatttgtataaaactacctaccatacgtagacttagtttcttttctgaatttgtctctaacacttgagtggggaaaaaaataccaaattttgatactgggtttgttgtttttaatgggtgtttgtttttggaagtgttgtgccaagagaggaagaagaagtgggtgtgggtctttcttccttttgctattttccctttgccttcttgtggtcttatttccaatctgattctatattatcagtttgccataatcctttgcaaaagacataaaatgttcatagactggaagttattaaggctttaaatcacatcacactatcattggagtaattttgggggggaattttgcatatttcagttctctagtatagggcatgtgctgcatactagggatgtaacttatacctgctctacttccctttattttttttcctcaggctgagagaacctttaaacttgttatgtgttctgaaacagatcaaatattagatttctaagactatcaggctgtggtggtgagggaagggttagtattatatacaaatatgtattagggaaggcatcatagttaagtgagaaaaacatgggtcttgagtattatgggagctcagcccttttccttactagctgtgtagctttgagtgagttatttaattcactaaactaagattttgaataataatacctactatatagagatattttacagattaaatggtatagtacatatagaatatttagaacagtgcctgaccctgagtgaatgttgtttgtttacatttcacacagcaagaaaagggaaaaatgggaaagagtggcaattagaaaataatgatattgggtttgaaaaaattgttttcatcctttcaattcagcatagtagtagaaagagcatttgtctagcaggcagagacttgggtaaaacttccagctctgcctccagaaagctgtaaaatctttgctgttcaccttagtatctcagactcctcattgcgaaaatgagagagttagaattcattatcttgatttagtcatatacttttgccttcagaagatttttctgcttctcagagtagtctatgacatatcattcaacagtgtataagtctcaaaggccaacagccaagtatggcagacagggctgttgttaagatattctttttcctgtgtaactatgtttacatgttcatttatgttctttgtatatttgtcatgtgcctgaatatttatgcacctgcatggttgttgaagtaagctcactagcatacattcatacatttttgtgggtatgtgtgtttatatataacctatatatatatatacagtatgtgtgtatatatataaatatatgtctgtgtgtatgagaaacagatgcactgtaggcagataaagcagataaatatagatccaaatagaagcataagcatataaatatagacgttatatagagtgaaagcaagcagatcagcaccatttcattattgcttgaagtctttgtaataaaagagttagaaatcagtaactgacattgaaattattgactgaatgacactgtcacatcagaaggctcagtgtgaggtaagaaaataacctttctttcaactttgaggagaaattagcaggaagatttattactgttaattatttgatttaggaaagtttttaggtgctgtgtagtgttgtgtttttaaaagtacagaaatgtcaccactcctaaaaatactgccatacaacaaaaaataaataagaaaagaatatctattccagtcttgcaaaaagatttggcaaatgtgacacctggatccctttcgtccacaggctgtgatttgcaactcttgcctatttctacatatagacaaatgagttggtttcgttctacagtattttctacaagcccctctgaagtctttaaggaaactcacctaaaggagatatctcaggctaaagtgaccattgttaagttattgtcatggggacacttgcaattgtctttagtgagtgtgttgtgtgagtaaaactgggcttccatctgttactttcatatcactgtctgtttttaccagtcaaaataattggttgtgagtttttgctttattttattttgttttagtgagaagggtattgtgagttatttttagctagctaatttactttttaatgttgcaagttatatcttgctcatgtgtttgaatgctatttgaataaaaaaaaagtagtccctccattttccctctctaaacctcatctatttccctagcagatcttatctccccttcagcttgttgtaggaacattcaaagaagctaaaatttgaagaaattccttgaaatgtacaaatacaaagcctgctttttcccagtaccacaaaactgccaaagttgttgcaattgctttttctgtcattagtctaccattgcttttccttacagggatgagagaagagggaccagaatacgtgttcctcctaacttctgctccaaatcagagtttagactagaggaaaaaaaggagggaagggcgaagcaataaagacttattgaatgttaaggaatgaattggtgcttcctgaagaactgttcattcttcttctctcaaatctggcttcagttactttgttgttaagttcttcaccaaattatgattttaaaatatttttaaagaatgactcagtggtcttgaggatcacacacacactctctctaacacacacacacacacacaaatttgtgtaagattcatttaaaaaattgcattgtttgaataaaatggagtatacttttcaatttataaattattttgaacgaatacttaatgtaatgtgtaaagttggcatactctacagtgtttcagactacagattcttttttaaattctgttatttacctgatgagctctaaggttaacttgaacaagtatttatttattcaagagtattatagtatatctacataaaacgattcagcaaagattttagaaaaataatcacttgccaaaataacatagtaaaagtcctttatctttacatacacacacacacacacacacacacaatttagactaaagcactatgtcccatttagcttaaaaaatgttttaggattagatttctgagggaagtatgtacatacacatactcctcttttcttgttctttgtttccttttctcctggtgtaacatatttactgtttagcttttgtcaaatactttataataattaccagaaattttgacaaagacaaaaaaattcatctgtgtatgtgtatatttataggtttatatgcacatagacacacacacacaaacacacacatccagattgaaatgttaatgttgtattaatcatctgatttttgggggtggagggtttgagacagggtctcgttctctcgctcagactggagtgcagtagcacgatcatggctcactgcagcctcggtctcctgggctcaatcaatcctcagcctcagcctcagcctccagagtagctgggactataggcacgtgccaccatgcctgctaatttttttttcactgtgttttgtagagatggggttccaccatgttgtctaggctggtctcaaactcctgggctcaagccatgcacccacctcagcctcccaaagcgactcccatggtgacgatagtcaccatgcctagccaatcatctgatttttttttatgcattatgttttaaaactttctcctaatataaatcttcaaaggaatttttgtaaacattcaaatgtctggtctcatttaaaggtttctaggagattgtgcattttcttatctaagacaaaacattttccaaatatgcatttggatatttgcatatgaataaacagggatttatcagagccaagagcaaagcaagaatctctttttaggagtcatttaccctttctacctcctacttggagcatgaggtagctctcatcattggcatggagacttttttttttcagttagatggtttcatattctgttcctggtgttgcattgcattgcagtacatatgggcctgggagtcaaacagatcttgattcaaacctcacttcgcaactttttaaattagctctgtttccttacgcaggttagctaacagctctttaactatgttgctaatctataaaacatgggccacagctacttcactgcaggtttgtattaaatgaaataatattaatggaatatatgtcatgtagtatgtactcagtaaataccagtttcctctggcctgttaattttaatatatagctatgatttcctccccaatccctctacatcatggtggcacatagcattacactataggtatcagatattgtagacaatgctaaagaaataggagcaagaaattttagaaattattgattatctaatactgaccctgggaatgagcttatgaggaaagaaatctaaggaaaccatcagaaattcctgtctcctataattgtaatgtttcctacaataatgagttaacaaacagaagtgggagatttttcaacacggtgttgctgaaagcctattcacatcaatacagtggaatggagtgatgtacattaaaccttatgaaataataggaaatccttttattgcccattcatatgccaggttaatgtgcttcattccacagtggatgttgctcaccttggctcactctagattaagctcattgattaactaccctttgtaggggaagggtcagaatacaactctcattgaaattattaaatagttgctatgtgttttcttttttaagaaataggaggggagaaacacctcccactctaagatacttggggctgcatttcagcctacagctgatcattttaactgaattacaaaccccataagcataaggtttataatggaaacaatgacccaatcttaattacaatgattttggcagcaatgtccctgctatccagagactactttctcatgtcagaggactcttttaacctcctcagagttctttttctgtgtaactacaattttagtgtgcaggtctttctgactttttttggaattgagagagtttgaccacattaagccaaggagatttctctgaatctcctcctgctgtgccgtaatcagtctcaaatatcaataatgtagaatggaaagaaagaaaagggaaacgaaaggtgtcctgatgtagtggaaaatgagtggtctggagatcatgagcctttgctctctgtctttgatgagatactttgaaatgctagcccccaagttttcatattgataatatggaggtctagacagctgtaactttctatagggaagcctatagctgtagtttactctgtttgtcaatatcttattgcagttttgttttaaatataaaccaaaggcctatttattataataatactaaatttacactttttcttcctttgtagtttctgaggatatcacattaacaaggaaattatttctgtgaggaacaagaataaataaaagtttgataaaaagatgaaaagagagagagaaggaagaatatgaagtcaggaagggccatatatgaactagacacagagtacaagtgagaggacaggaggcaaagactctaaagagtcaaaaattaagacaaggaaaaggagaagcaacaatttgaacagtaggctcacatttaagataaaaaaaagtataagatagctttgaggtgaacattttacataatgtaagaattccttgtcttataaaagaatcctttgaaatcttcccctatggcatttaaaataagattgaatttatacaactttgatttagtctgtgctgtgaaaaaaatgaactgtgagctttagatactagtcccagctctgcctcaaaatatatgcttttgagaaaattaattctgagtctcagaatcttcatatataaaatgaagaagaacaggtaagttctcatccacttttaagaatcatgaaatgaatgatcttgttgacatattgccagaatgcttattgaaggaagttgctgaatccgattacattaaatagatgaccaagagagagaaataaaaaactttttgaaggttttgactaatatctacatgctcagtcctacagaattaacaagatggtagccccattttttaaaagaatatggctactattgctaaacatgctttaagttgaatcttcgctggaatttttgagaaattgtagttgcaattctttttctaaaggtcttattctccaattaactgaaagatggcatttctgactttctaaaccagaattttttttttccaaaaaaaaactgtttaaccaagaaaatggaaatcagtacattcttggtgtccttctagtaatttaaatttgtgtaacctaatcaaaactccacctgccttgcccttcaacaaaaagccatattctcttccattactaaatggctacatttgtctcagtattttttaaaagatgaattacgttgatatcccatgactttttctttagaatgtgtccatggaaattaaaatagacttttctgtgcccaagactgaaatgaaagacagcccaaaagggctggtggaaatgaacacaaaactttgctgatgttatcagtattataatttttgttaagctttttcctaataaaatggaactgaagtcaactgacccctaaataactgcctgatatttctcttacagtattattttgtgtgcagattaatgatagagcaatatagcctaagatttcttgtaaaacatcggaatatattttttcaggcctttctagtgcattctttctacagagatatttctcccatcatcatttttcagtttcaataaatatttgctgagtatagaaaatgtgccaagcaccatggcaagtgctaggtatacaactgtgtgcataccaccatgggtcattaaagcatctttgacaagtggacagagtacgcatctgtttaatattttctaagctcagatggctgaaaagagaagacaactggatgactagaaaccccaactcttgttctttcctttggataacctcctgtgatttttcccagtcatcatttgcaaacacacattgagggagaaatcaagttccctgcccagcttttcagctgattactaaagagaacttctctttctctttctcaccttagtggttgttctcagccataggagggcactcaggtacaggaaggacctgtacctagcagcagaaacaacttcaccctttctttctggtccaagctttgggaattcattatatggcatgggaagcactgagcagcattcaaagactgagaatgctacaggcattccacccaaacaaaagtaaaaggctctccatagacataagaaattatttaaatttctttatgaatattgttcctcaatttagcgttcttcctcattttgcctatttctcttttattatcctatattgggctgttttgttcagccaaacaatttgtagcatgtctgttttcaaagtaaaatagtgatatatttaaagttctaaatgtgttctttatgtatttttaaaggagatgggtaaaatagaatgtatttctctttaccctgatgacattcccgtgatatatttcaaataatatttttgattgggtaagccagtaggaccaaatccatggtgatcacagatacagattcacaaatgcatagagagaatcataaatagatgcatatggaggagtctgacagtatagtgaaattggtttcaagtaatttgacacattagaactttcaggcattcacctgccagtaatccttattagaaataggattggaatattggggtcaccagctcaagaccatttttttgtgagagctgaacaataaccaaaagtcagagctataggaataaaaatgaacctattccagtcattagaactgtttctctgaataagctctttcttcctctccttcattcctattttttcctctccctatttctccctttctctttttcctccctccctctcctgctcctttctttttagtgttctgaattcattagatggcatagtgtaaatcaatagtaaacgctaaccgcctactctgtactcagttacgcaacatcacttaaccggtacacagagacaaaaagggaaaaagcacacacagcctttacattcaaaagctcttgcataattttacttttccacagccaaaaagaaaaaaaaaaggaaataacagatggggaaacttacagttttttttcccttttctcagactgtttaaaagggagttagttaacatccatggccctttctagttgccctaggctgcagcaaaatgtcccataattgtcagcaccttaactggctttaaatgagacatcgtgacctgtatgatgggttaattttccaggtaatataaggcaacttattttgagatgttttgacttcgtttttacttattttgtgaaaaaccaacaacatttaaagtatgaaatgaattttaaaatagaaagagtataaggaagacgggtgtgtgtgtgtttgtgtgttttcacttgaaatgtatcctgatgtaatatttatgtaaaaaagccagttatataaacccatctttctcttgctttttactttgggagctatataaagctctaatgctttttttttttctttttttctctttcttcttctttttttttttttttaacaaagtacattcaaactccaaagtcttaatgaaagagaaaacatctagatgctacaacagagacagttaattcagacttcctatagaattcatcatctaaacaacagttttatttaagaaggaatagtttctgtaattctcatttagagctttctgtcacatttctccctggaacacctttggtttcactgtactgccttcttaatgtctcaaatgtacaataaatctctctctttctctctctctttttctctcgctctttctgtagcccttcgctccttcccacaaccccctcccccttttctttcattggagtaactccctttccaccttaagtgggagcacagtgagatttgtatgcaatttataagtccttcatccctgttgtaatatttggttttgcttaactgactggtgtcctctgggaaccaggcatttgtctgataagggaggttggagggattttttgttttgttttggtcttcctttttagtttctgcctctcaagcggtcataaaatggatataaagtgatagcacagccctaggcactgttaggcatctcttagaagaaattaagttcaggtgtgtgaagggtagcagcagtggtggtagttttgattgtttttaatacaaccagaaaaggtgggaggtgggtggaagagaggatggatgcgatcattagtgtgtgaggaggaactattgaagcgcttgatctccttgtatctcagatcagcatcattctttaagatcatactttacttctggatattaaagccataagaaattggttcatttaattttactaaagttatgaatttgtttaacactgtcttatgtgttaactattgcaatttagaattcctttgtatggaaaaatctggtgcacaagataaaaatcaaaactattattgcccaaatgtgaggttctctgttttaacaactgggtgatcgagattattggtattatcccatctctgtatttgtgatgacttgcggaaatcttttctgatcttaatatgaataatgactaagctagtatatatatatttaatgtattttatcaatacttttccatttagctttattttcttaacaggatctatagctcagataaatttattacagagaaataatgaaaattggtcagaatattctagtctctaactgggatatcatattcccacatgcatttttctaagggttcctctacatgtattatagttgagtttggattccaatatgcagttttgcatgtaggtgcctgattgtcaaaagaaaaaaacataaaacatttgcaccatgtaaagtgcattgtttatgatgtaattttaatatgattaacaatctgcacaaagctttttaaatgtgtagttctgtatacaagaagttattctgagtaccctaattttcaaatgggttgtttaaatttaaaaaaaaaaaacttagaacacaaaagtgagggagatttgcattttattgattgtcaaaaatagttgaaagtatctcgttataaaagaagcagaggaaaagtctttgaactttttccctgcctcttgttgtcagaatagcttccattttcatcttggtgggttttcacggtctctgaaccatactagggcaggactgacctttcaaatctcgatgtgtgccaatgtagacttctcggctctcattttctgttgtaaccaaggccttgggaacacattagctgtttctcatttttctgtttttttttatttttttaatatgggatccaggcttaagacaggtggcaggcctaagctttctgttacttggacatgcaagaaaagaagctagggagaattttaaacagtttcgaatttttcataagtctttgacaactctttcaccctagcttctcttcttattgctgttggcagtagggatagattttttcttttaatgtggcaacaagaacctcagttactgacttaccttttcaagcagaatccatccagttgtgtctggcacataatagtaccatcataaatattttccgtgtttcagtgaactcgtaagggacctgctatggccaaccctgcagactgctgatgcaggtaagcagtaagccatacaagtaataaagggtaagaagaaatctgatacagaactcttcagactgtagtagtggaccaatcacttcattttatgagaaaggcctttttatcctttctgcctttataaaagaagcaaatttcagaagacaattttacatctttcctagaggttctttttaggggtctgtgctacatagactgttggctgatttaacaaacataatttttggcaagctactttggtgatcctcattaagtttcatatgcaaatgtgttagatacttatgattctagctatcgagtatgctcctcatgcactctgccacagggtcctttgaatcttggcttttctcattttctctggacaattgtttttggacttcttttgtttatataagtcctaggatggtaactataaaaaaaattctatagggttcttcttttatacagtgtttcattacttttagctacacgaattcctgatttttctaaatccattttggcttaaagtaatcatgctggccattttcaaggctttcattgtggtagtgatattgggggtgctgagtgatctttgggaaaaccacctgtagcttctgaatgttaaaggcattgaaaagcttgtagaatgatagactgctgcctgttagatgagcagttttttaaatgcagattatataatatttaaagactttgttgctccacagtagaagctttttaaatgttaatttgggttttgttttgttgttctatgacttcgcataaaagattttgggtctaaaaggtttcagttcactcgttccatttgtcttacaagacttggaatataatattatacatttatttatacttataaaggaggataaggccaataactcacaactcatgaaaccgagggtaaataatccatagcttattctcccaccattgccacaatatttataacacaaataacaaacaactaaaaacaaagagaaaccagcttgtttttatgtacaaaatgtttgatcaaaactacagtaaagctcaaatggagctgcaaatcctagtggtttacagtggtttgatttatttttttaaacagaccatggataattaaccataaaacataaccttctcaacacaagttacagtgaattgcagaaatgggcagcaagtcattcataactggttgcaactggttagagaccttaaagttaaacatgcaggcagttacaaaagatactttcttagtgcacaattctatttccattcccaaagggaaacatcctttactttttatatactaccacttagtcagtatcccaaagtgaggaataaatgggttattttctatgattaccatgttatcatacatttattaaaataaatacctagcacttacctgtactctttttatttcagaatgtttcatcattactaacaggatattcctcatgacattgctgtctggtaagtaactctcattatctctaaatggcagtccaaaatattgaggtgcaaagaagtcaaatatctttccatgaacctcagaaaatatgagatccaaaggctgtggtgagtctttgggtctaaactttagcaatactaaattttgacagaacatattttgacattggtaaaggacagatctttaatatcctatttgttcatttgaaataccagcatttagaagaataagaaacatgatctccagaacctattatcacagattttgacaaatattttagaatactctgctaaacaagatggaagtattcaaaggatttgtttggaagaccctccagagagatatatttccaaaggagactcctgagtggacagaaagagtgatagggtgaagttggcactgatgtttcctgtgtggaacattgtatgttttgaaaaaactcaaaaccctccaaacacatttagtgatactttgaactacccattagtattctatggtattctgtaaatttgaaatgcatttgcttcatttggatcaatcttaaaattagacatggttgctcttgtacttaccaacaagcaaaaaaggaaaatacccttcaaagacataaataaggctatcctcttttaccagttaagtaagaggaccaagaccagggctacaggtaagcataggcttgaagatttttctaggtgtcttgtagtgaaaatttgtaaagtttgtaaagtttcaaaaagattggtattgtggccttctagaattcttgatatttccatgactgggagaagagtgcaggtcaagactgggggtgtatagataaagtattatccaatcagagcttgaaacagctgactttgctagaggctgacctgcattgaaatgcactggcaactgtactggagagggaggaggaggaaaagggtgacttccctggcatctaactgtgttctgcctggctccatctaggcctgtttagtcatgaacatcatattcatccaaacctttaaaagttacactcttgacttcgctttatatgaacgtgcataaactgagggaaataatctcttggggtaataaagatagttttctaacagagactttccatatccattgtgcataatccatagttgtcactgtgttgttgtttctgattctgttgcacatctatctctgtctctctgagcatatccatctcaccagtgaaggccaggagccttcgggattgtagctccgcctccctccccactcccacgctttacttgctatgctaccccaaaagaaactcgtattagtaagcctcaggagctcaagggaaaggcttatttggtgactttaatttgtcactccttttgcatttatcacaaaatgatctcatcacaaaaaggactgaatttcacgcttttgctggcttgcaaacaagccagtttcttccctattgctgtccaacacagagaaagctctttatgtttctatgatcagataaaatctgtattgacgtttcttttcctgtgggtgtatttcccttctaggtatggagatttaaactatctgggcaatgctgtgtgtttgcagtttctctgtttcagtaaatgaaaagctccttggggaaggagaacatatcttttccagtaatgaagaaatatttattttcattttaaaatgatacatgctcattaaaaataatttagaaaaacacataggagtaaaatgaagaaaaattaaagtaattatttctataatttaaatccaatcattaataaccatttgatatatttccttactctcattttccccgaggatatatttttaaaacatgatgttatcatactttctatataattttgtgtcctgctttcaaaatttaacctaagaaatatgtaattacatagaccttataaacatttaaaataaatatataatattcctgaagaggaatagctcatttaacctaaatgcccaataagagcattattattattatttatatctcaataataccttgcataaacagtaaatgaatcagtcaacaaataataaatgaataaaagttcaaatcagtatatgtttttaaattttttatgataaaaaatcttaaattcatgaatataaacaaattactataatgaactcccatgtactcatcaccagcttgcacaatgactaactgatggcctgttattttctcactatatcaccatgttatgttgaagcaaaccccagacattgtagtatttagtacatcattatttcagatccatcaggatattttttacacgttaatgttaaaaactattcagataaatagttcttattattgtatatagtagtatttttcttcatagtatcctgacatcatattttctaacatgtaacagttgattgtaaaatctcatcagtgagttgcctaatattcttagacacatctgtaagccacagggcaatttggttgcctagagaaatatttcacagatttggctaggtttcttgggggaactattttcttttggtactttttttacttgactcaaatttaggatgctaatttgcctgccagatctatacagcattaattatacttattattgggtttaagcatgtgttgaatacaatttcttacctgaggtgaaaggaaagcatagtccccttattacttagaactccagtctggctacagccaaccaataccagataaatatggcaaatctacttaaatcaaatgtaacactggctttaaaagtttataatttttaattaagattattggcagacatggaaaacatgtgatgggtatgtgaggcatttagaaatatgtaaaagggggaattatataataaaaatctgaatcatttttaaacaacatgtttggggggaaagaaattatgcattgtataacaaagggtgctctctgtgcttgtattattgctctagtttattctaaaaatatttagaaccctctatgagccagcttcccatggctagcctagatcctttacacacagagttccacagatgaggaatgctctgtacaaatcaggctgtctgtagagaacctgtatctgtagtcttgtgctgtctcactgtctttgaattgtaggtcagtgactattcagtagtgatgtgttgtccaacaggtgtattacacgcatcagaaattcaggatgtaactatgcaacatactgcatcagtataaactgaatttatgtgttactcaggtctatttaatcttaggagcacattttccattggcctcaaaagtgagtagctagaatattgatgtgcctaacccttggggaagaaaaaaaagtttccccaccacactaaatctctagaaaaatatgagggtttacagtatggacatatacaaaatattttcagccaaaactggtagagcaaagcacatggaaaaaaaagagaaagtcataacattagcaataaactatcctgagcaaacagagagcatatataaaatttgtcagattagatggtataaacaatacaaactctttttttttctttccatttctttttcccctctgaatcttctgattattttgtctcctttactctgggcctgtcatcatcattaaaatatcagaaaaggttagaactatatcggatggcttgactaaggcaggtgtcacaagaaaagaccagtaggaactagccattatactattttaaagctgcaagtcttcttcacttttttcagcatcctgttcttatatgtggtgttaaattatgtgtctcatatcacataaacctagaatataaactgccttttaaaaagatccataagtttacccacagttctttctagcttatgtattatatatttcacccaagtgaaccatcaatgcctcatcattctaatagctgtaataacaataattattattaatgatagcatttgcttcttggtgtatgtacgcgtacacctttttctcttgcttcaggtttccttatgcttggcctctttggctcttggtgctagttcagttgttgttacatttgtgacctcacgtatcctcaagctataagacatttcttagaacgaactagtacgatacaccttccacctcctttcccccagttaagctcagaattgtggttagatgattctgcttacatgaggcagggaatccttggcagatacccccaccaaccaagattttcattttagacctaaggataccaatacatgtcacaaaagcaagataagtggtttgttcagatcatcagatccctgtttaatgaagctgacatattttctgaataaactttattggatgcataacacaggatcatgcacaactgctataggatgggatttatgacattaccgtaatgagagaactttggtgattctgctctacctagagtggtgaaggaaggataaaaaccccactcaagacaaaaatattcaagaaaatggttctgtagtcagctcattcctttcatggtggaagtgttaacgaaagaaatcttcacttatttttctcctcttacctagagaatactttcttcttacctagagtctgtgatatgaagaatatgctctgtagatggtcttatcttatgtggattggtccatgggacactatgctaggctccatagagaactggttatgtatgttctgtcctcctctatgaaaacattcctaaccgtactgttgatgtatacatttcggtcaaaagtaatttgctttctgggtatttgatggccactctgtgaatcaacctaatgtatttgtggtatggaaatctgtaacctctcaatactaagtttaaagactcttataattaattattgaaaggcactttagcccttaactatttctctctttggagaaacaaattgatcggttaatcatgtctttgtttatttttattgttgttgctgtacacattgcacataaaacaggaaagaggaaaggctgtttgtaagaggtaattacaatggcaaaattgtattttctctaactgttctcattttctcatgtctgattatatcaagacctgcactctagaagtgtgtttcagttttgctaagaaaatgatagaggagaagaataaatccatttctataaagtggtgtcaaacacaacttgacacagttacaaatttcttttttttttttttcaacttttattttagattcagaggatacatgtgcaggcttgttacctgggtatattgtgtgatgctgaggtttggggtatgtatgatcccatcacccaagtactgagcatgtactgaacagttagtttggttttttgttgttgttgttttgttgttgttttgagatggagtctcattttgtcacccaggctggattgcagtggtgcaatcttggctcactgcaacctccgtccccccggttcaagtgattcttgtgccttagcctcccaagtagctgggattacagatgcgcgccatcatacccagctaatttttgtatttttagtagagacagggtttcaccatgttgtccaggcttgtctcaaactcctggcctcaagtgatccacctgccttggcctcccaaagtactgggattacagatgtgagacaccgcgcccggccactaagaagactttgatttctcgtcacatcttttgataataaggatctggagccaaaggagaaacagaaactacttttaagaactttggagatccaagtttagtggactcttaagagcctgtattatttcttggatgacttatccagccctttgtagaatcagaactctcacaattttctttaaatcaaataaaacccaaggggttaagtggatctttaaaattatttccaggtcattctttcaataaacatttattggtttatttgttattatttcaacaaactatgtgacaggcaaacatgaactcatttctttctttctttttttttttttttttacctttcaactccttttatttatttacctatttattttccttaagcaagtaaatctccctatggattgttaagggccctgtgcatatttgcatgtagccaaagattcagtctcttgcaggaactctggttgtcaactggtgatcttgcctttgtcttttctcatagttctgcctgtggcgcctgtcactagcagtcaaataaggacaattttaccattctctcctgctgctctaatttttttttagtgccggtacatgaatttgttattctttataattccctttgaagttggaaatccaaggggaatctaaaaccgaccagatgtttctgctgctggaaaggaaagagagtaaggattaagtttaacaaaaacttggtctccagaaaaaaaaaaaaaaaaacatttcagctggaaatcatctttaaatgcattcatttgctacatatctgttagttaatttacatttactggtcctttgtaggctatgtcctctatcaatgtactctggggaaaaatcatacattttgttaacaaaaagacccatgctgtggtttgctcaggcccatttccctcatggagttttagttctattactctgcgtatttttctcacatgccttacactgaagttatcctgttgctcttgttgttgttgttgttattgctgttgttgttgttgaaggttcactatcatatcacataaagtttggaggccattttagcaaactgatccaagagggtgaggtcaatacagcctgcggttagggagggaaggaaggaagttctgccaaactgcttagcctttatggagaacttcattctcgttagagatatgtagatcaaaacaagaacaagagtgatgaaggccttcagggggaataaagagaaagtcttgtggtttttcgaggattcagatgacattgcagacagtgtgaataaacaggttgggaaatgaaaaatgatagagaaaggtatattagaaaacaaaagagaaacgggcatatgtgagacacatttacaagacctctcagaatgggtgcccaaggcttcagaccccaatacacaaagggaagagtaattaaaaaataaaattagagaagagtcttaaaaatcaatcagaatgttttggtggttggcttaatacttcacaaaagcattggattgaagaaatggatattttatttgcttgtttcctgcacagcatctctcatactatcctcctcagttgttctctggatttcctaggcttccctaggttttcagaaggacaccaaattctgtgaataactgcttcgcactctttaccttgctcagtggattaaacatttggaaacatttcccacacctcaccatcacaagggatgaatactcaccactcagagtttctgttaccctaccctatcttatttttaaatagaaagtctgagtcctcagtaattatattaagctccttaagctgcacatatcaattgcatataccattttaagcattttccagtctttttaaagagagagtagaggaaaagacagagagaaatcacttagcagctgattcacttattttaagcagctttcttcattttaaaatataaaaaattcaggtcctggaacattgggtgatttgaatgttctataaagatttgaaaaaagatttttttaaaattatatgttctacattcagggacctggatttttagtttagtccttaaaaaaacaggttggtgaagtaaaggagttttcagtctaaacactttatttcttcttccttttcatttatttatttattattattactattctcttttgtcaaagcatacggtatgaaaagcatttatgttggtctcactactgacagagcttaacctaataatccaagacttggaacttggtgtttcaataaaggaaacactgtttgaggtattttccattcaaaccagcatcaaaagtttttaattaacaccatcagaaattaatggactgaatgaatgcaagacagcgttcctacatacccctttactgggaacaagacagcaagtgggatccattgtgtatgtttgtattttataatgtatttttatttacttattgaagcagagtcccagctgcacattgcgtagcagagctacaagagtgaaacctgccgagggctgcttcactccagcagtttcattttgctcactgattgttgtcctgagttctttgtgattgtaattggttagaaagtttgaaattagcaagtccttgtcagctcatgaaagctttgaaatcatgaggcttgatacagctatcaagcctgctgatgcctaatcacttttcgggctaagaacctccagagcggtgaacattctcagtccccaggctttacctcaatcaccaattcaccaccctctggagctccttgtcttggatggtggctttgtttggggccctttcttttccatcactgaagcctatagcgggatgaacagattttggactgactaatggggatgggggttgttaggaaatgagagcaaatgggaaaacagaatgatgtaggggatcaagggaatagggaggaaggaaaaggggtagaaagagcataaaagaaaaaggaagcgggatataagatggaaagagctttgtaaatattgacatttagattctgtgcaactggatttgatatctcaggatagaactcactgatagagcctaaatggtccccagggctctttattttttcagacttttttttaaaggcctgcccactcattgtcaaagggaagacatgtgtgttcatataacctacctaccctaccacctccccatttgtgaggaccaggaatacaatattttcttttatacattacattagaggaatgaggggtttatcaactcctctcctgtaaccataaaagtatccattgtttatccttatgctctgagtccccaaaccaattttctccagaaaactctttcacagcttggtaaatttttaaataaccccaccttcatccttgtagcaatgcaggagctgctcaggcagggttacctaaagtaaatagatattgtcagcaatgatgaaatgtttacgaatgcttaaaggtcttaataactttctgtatatctaactcatttatgttcaaagacctcaagcttcatacatttaggtgcaactcttaacctgtcccaatttctcctgtattttaataaaaacaaaaataaatacaaaccagatacaaaaacaacaccacaaatcttaatgctatgaattcagaatgtcagaaaaattttcaataggccccattatggcaaaatgctgcaaaaatgcgtcagcattttgggaaaagctccctaaagtcgttcaactatttcttccctgaaatatgggaagatgaatacatattagactcctagaagaaaataattggtgaatgagtgtcaggattttcagaagcactgctaaaaatctgatcttgccatcatagcaagagaatcagttaagcctattaacaacatgtcatttttcttagctggacagtgtaggatttactgtcccaaagtctgacttcatgcaggagtcagaggagacaacttgtttggaatataatttaataaagaagatgcagcctaaccttccccagatcatactttaaaggatgcaatatcagactacacagtatattatacaccactgccccccaccccaagtctttacaggcttctgtagcagatatggctgtcagaatcctgtcatagtccctcagagatgtcaggcagtgctgtcatggtcccttcagctgcacctgaagccgttctctgctaacccagactcccacctcaagtatgcttttccttctgccccaggaccttttccaatgctgggagatctcaaaaaatctaggatggggagagtggggcttacattaagcccccagggcttaatgccctggggaaactctcaactaaaggaggaatagagctggaaaaagagatgttctagcctctatttctttataatgtctacctctggagccattttgtgtaaatctcagagatcctggccaatccttattattgtcaatccttattattatcttaccctctgagattaccttctaagttactgcctgtactgaagcctttggagggaacctaaaatgagccaggtactcaggttggtttgtttgtattaatcaatttgcagcaacttcttctctactgttgactgccccccatgaattattgtccattcatagcctgattcccaccttccatgagacagattaataagactccacaacacaaatgacaatggaatggaaagttcagaactctctttctgtacctcagtgtctaagacatggatatgtaaagattttttctggggtatggtgaccaagatgatcaccttaacatcacaagcctactcctttttaaccaaaatgtcccagtctggactgaagaaactaaaggatgaggaatagtccagcaaaaggtaccttaattttccaagtagtttactttggctccaggtaagtacaaaaggacatgatattccatgttagctatatttctctctgaaaaaaaaattccttcttttagaaaagtttatcaaacatttaatctaggagaataaactattgacaactacagaatttgttcccgcagaaaatacctaaagtctctgctcatttcatgtttactaatatttcattagtcaaagcaagtcacttaaccaagctcaaagccaagagacagagatatatatcccatctcccacattaacacatactctactgagagttacattcaagtcatatggtaaagtttatggatgtaaagttctattatagagagggagtgaagaattagagaaagtaatccggtctatcacatatattattggtttggactcagaaacaaatggtttgaataaacaacttaagaagcctgatgagttataagggacttttgtgttagtgattgataccacatttacaatcacagtctctctaatcactttcaggggttttcatcatagattacttttgaattcatcaattatggtaagcactgaatagaaaataagggtcagataaaacacagtaggttagagatgaagagtgcgaattctattccagctctatcactgagggtgaaatctcacacatttctactgattttctcccccctcagtattatgatctcaaaaaaggagtactactcttcttttttattttttcttagtatagaaagcatacaaaaggcattgtagaattctgtgcgtagcataaattacaagaggacgattaaaatccccacaatcgtctagaagtaatttgttttcaaactttggggatatacctttctaatcattttttttcctgtgcatatataccctttttgtttttggtaaaacactgtgaacactgtttctacttttgtctcttaaatctgtgttgtgagtaacattctatgcctttaaataatcttcagtgtcatttttgtgaagatttattccacattcaccatcctttttttgtgaaatttaaatcagatgtcataaagtctttaaaaagcagaattactttgaaaataaaggtattattattatagaattttagagattaaagaaaaaacagaaactaacatttaatgaagacctactctgtgccatgccatgtgcttagaactttgtttaagccatttcatttaataacctttcaacctaatgaagcaatatagcatgatggttaaactctgtgggctataggctgtcaagttcagctgcacagcggctaactagctttatgacttttcaaatgtttatcttctttttggcttagtttctctgttacaaagtggcaataataataatagcactcacttccaaaagattgttgtaggattaaatgattggataggttcaaaatgttaggaacagtagtattcaataaacatagttattatttgctatctttcccactactccataaaccctctattaaaatacaaatccacattgattttaactgctttggtgtagaagtggattctaagaagaggcaatgtgaaataaatggaaaagccaaggattttatgttttttaatcctggctcccagccttctaataattttgcctctgggaattttgtcaagatttacaggctgggcgtggtggctcacgcctgtaatcccagcactttgggaggccaagggaggtggatcacctgaagtcaggagtttgagaccagcctagccaacatggcaaaaccccaactctactaacaatacaaaaattaaccgggcgtggtggcacacgcctaatagtcccagctactttggaggctaaggcagaaggatcgcttaaacccgggagacggaggttgcagtgagccaagatcgcaccactgcactgcaatctgggttacggagtgagactccgtctcaaaaaaaaaaaaaaaaaaattatacgctcagttatgtttttaattaaaatgggtaaatactaacaatctaagggtttttaaatgataatttaaatgagataatatatgtttagagtctactatcttgcctaaacaagaaatagctttgtaaatgttagtctgtcttctcttgcattgccattaaattgttgtatttgttttaacaattagtatctctgggcaagtaaatttatatacttttaccattaccacaggcactcatgcattagtgtgagacagtcaataaatacctgaagactgtgtggaggcagtgctgctaagttgtaagctggtatatttcttggctttctgaagtttatcaccagttttccctgactctagcatgatctgtaccctgcagatggccccactgttttttgattcagtaacgatcattgtcaaacaatagatttctcttttgtatctagttgatgtgtaaaggtttttattcaaattaacagaaaacattttcataaagcagcttttaatttattcaatgagcgtacaagattactaagtgaaacatgcaggagtgaatgattgagtgaatgactctatcttatttatctaatagttactgagcactggttgtgacattgtagcatttggacatcattacttggccaagtatatcaatgcagtgtgctttttggtttgtttgtttgtaaaacttagacaagagtcaaggtcaatgccctcaggctgttaactgtttagattctagaaagaaacttggagataaatagcttcaaaataaaatagagtgaaatagatactgttatagaagaataggcaaggcactgtggttaattcttttttttattttatcacatattttttaaaaaaacttttaagttatactttaagttctggggtacatgtgcagaatatacaggtttattacataggtatacacatgccatggtggtttgctgcacccatcaacccaacatctacattaggtatttgtcctaatgctatccctcccctagccgtagacccccagataggccctggtgtgtaatgttcccctcgctgtgttcatgtattctcattgttcagctcccatgtatgagtgagaacatgcggtgtttggttttctgttcctgtgttagtttgctgagaatgatggtttccagcttcatccatgtccctgcaagggacatgatgtcatccttttttatggctgcatagtattccatgtgtatatgtgctacattttctttatccagtcaatcattgatgggcatttgggtcggttccaagtttttgacattgtgaatagtgctgcaataaacatatgtgtgcatgagtctttatagtagaatgatttataatttttttgggtatatacccagtaatgggattgctgggtcaaatggtatttctgattctagatccttgaggaatcaccacactatcttccacaatcattgaactatatttacattcccacaaacagtgtaaaagcattcctatttctccccatcctttccagcatctgttgtttcctgactttttaatgattgccattctaactggcgtgagatagtatcttattgtgattttgatttgcatttctctattgaccagtgatgatgaggtttttttcatatgttttttggccgcataattatcttcttttgagacgtgtctgttcatatctttgcccactttttgatggggttatttgttttattcttgtaaatttgtttaagttccttgtagattctagatattagccctttgtcacatggatagatggcaaacattttctcccattttgtaggttgcctgtttactctgatgatagtttcttttgctgtgcaggagctctttagtttaattagatcccatttgtcaattttgggtttttgttgccattgcctttggtgttttagtcatgaagtctttgcccatgcctgtgtcctgaatggtattgcctaggttttcttctagggtttttatggttttaggtcttacatttaagtctttaatccatcttgaattaatttttgtataaggtgtaaggaaggggtccagtttcatttttctgcatatgactagccagttttcccaacaccacctgtgagacaaagattatgatacctgtcttgcagggcttgttcatattaagcacctaggaccttacctcaatgcatgatatgccctcagctcatggcagttacaattataatcactttattttcttacttctgttctctcttactagtcccatcttccctaacctttactacttttcagatcacatttgttgttctttgcatttttgttgtctattataaggcctagcacataatagatggactagaaatgtatctttaatgaagtaataaattataataactttctgaggtcattcttatgctcgtgctttctggataaatacaatatacctttctttggcattacattgtaagtaattctacgtactcgaaccatttaatgaccaaatttcaggaattttctttcattgaaagtctctctttttgaaattatcagcttaatacaacttaaagtcatacataagatgcagtgattctgcgacgtatacatgaaaactactgactttgaagttactcacttcaaatctttagctatatattgttcaaaagcacagtcaaaatggtacctatatcttcagtgtggaggtgaaggcagtattaacaatatcctatagttgactgaagagttggttacagcaaagctctccattgcccttaaattttctctctccttaatacagtaggatcaattttaagtgcattttatgtgtgcattttaaaactcttttttttaaaaacagaatagaaatggttttcagagtgatgctgatattggttgatgatgccaaggcaccaatggagagcatattttttaaattgaatatgtttttattttcttgtttgttgatttttaaagtgaatccaaatgtgaagaggaaaaaaatcaaattctgccaatttgaaaagaacaaaaccagctaaaaccttcttttaaaatttctaagctattatgagaatactacagacaaaagattgcatatgaaagatttttttataaagaatcagattgctttgcctttctttagtcatttcaaaagtctttgtcaggtatgaaaaagaaatatactcaaaatgaagagtaaatataattaaaacagttccttgccttaacatataaccttcttatgggcaaaaatctttgtaaggttaatactgtaaaactttgatttaaaagaaggaataagaaagagtaggcagagagaggaaggggagaggaagaagtttgatttttgtaagagtaaacagaaaatgatagtaaatgaaatgatattaaatcattagctgcttttaatgatacagttttagacccacaatgtatatatatatatttttcaaatttccagtatttggcatgtacctgacatacagtcatctcttttcaatagttaacagaatgagtgatattgtctgggccagcagcccccaacgtttttgccaccagggaccagtttcatggaagacaatgtttccatggactggaggtgtggggatggtttcaggatgaaactgttccacctcagatcatcaggcattagattctcataaggagtgtgcagactcaatccctcgcatacacagttcacagtagggtttgtgctccaatgagaatctaatgctgctgctgatctgacagtaggcagagctcaggcagtaatgcttgcttgtccactgttcatctcctcccgtacagctaagttcctaacaggtaccagtgtctgaagcctggggactggcggctgctggtcaaggccacattagtttattgttaagtgcaaggtttctggtaacagaaataaagaattcaattgattcatcatcaagaccaaatatatttactaaagatctaccttaaattcattttttagcaggtagtatggcattgtggttaagaatttacatttgtgaacatttaccagctgatgaccgaggtgagcttctgtttcctcctgcataaacttgagattataaaaatcccctagttggctgggcacagtggctcacacctgtaatcccagcactttgggaggccgaggcaggcatcacgaggtcaggagatcaagaccatcctggccaacagggtgaaaccccgtctctactaaagatacaaaaattagctgggcgtggtgttgcacacctgtaatcccagctactcaggaggctgaggcaggagaatcgcttgaaccagggagtcggacattgcagtgagcccagatcgtgccactgcactccagcctggcgacagagtgacactccatctccaaaaaaaaaaaaaaaaaaaaatcccctagttcagaggcttagagggagaatgagataatgccataatgcacttgtccagtgagtaagttctcactaaattttagacattggtatattatatcatttataatattatgggtaaatgtaagtattacctgacagagttgttatgaatgttaatacacgtgatttcagtagtacctaggacatctaagagttcaacatactgaacatttgggaacccctacacgagacaaaaaagattcatattcacaatttttctgaaaaacaatctaattggaaaaagggattctatttattaagagataaaaatcaataataatgaacttaatgtttatagaacattgaccttccattgagctccaacatacattatctcatttaaccctcacaacaaatacatgaaattgcttttattattactactttatacagaaggaaactgaggcacagaaaagttaagcactaccaatatgtggcagtaaaccctcatattagactccagagcctaagtttttaactactgtgttattctaaatggacggtgtgcaaatgaatacgtaatttgttgagaagatcaaatgaatgctgcaagctgatcagttggggaagaggatcaggagaagtaaggaagatggggcctttagcaaccaaaatattcatcctgtaacagagtctggcttcctaggtttgaatcctgactcctctacttactgactgtgtgatcttgggcaagtttctgatctctctgtgcctctatttcctcaccaataaaatcggagtaataacagtactctctggtagagttgttgtgaagatttagcgagttaatacatgtgattacaatggcatctagtatatctaagagttaaataaatattagctgatattaatattattgttattgttactgctgttgttgttggtgactgaaatactctgaatttgtttctttctttcttattgagttagcatctagaattgtaagcgaagtgaatatgtgaaaggtgtggatcattagaacactaaagtgcagtttttctactttcagcccaagaactttgctttagtttaatatgatgggaaaagaaaacatacaattcagagcattccattgtatatttaggtgaaagaaattcagtaacagaatatgtgtggtagcctcatatgatttctttctctttatgcccacccattgatttttctgttagcctccttaagaaaatagtaatgtcaagtaaaatataattgtgattttacttcttctgaatacataaaggaatattatttttgaagatatacacacaaaaactttaaaacagaatgttgggaatgctaaccctacagctcgcattgtcacgtttagtccattccacaaacggaatggtaatgtgcttagtagctaagtatgtagaagcctccccacccccggcccagcaaaaaaaacacagtaaccttatccatgagaaaaatatgataatattcattgacaggggagctacaaggagcaattttcccaagctgtgtctttcagacaatgctgtcagtttttccactttgatgactacagctggggttgtgatgcaaggacaagaaattacagtgtggctagaagatcagggcattggctatgctgttagctatacagcaaataaaataaaattaaaaattaaaaatattgtgtatatatataatatatataatatatattcatatatatatatgaaagatagattttttaaatgtttgtaatagagattattttgggcagcacttgcctcgatttgctctctactagagacctcagcaaaagcagtttataggataccttttcttctgttttttccagagaccctttgaaggcagaaaactataccagaacacccatatttttgacttgtgtgtgtatgtgtgtgtttatgtatgtatatatttaaacaaataccacatttgaaatgtttttcagtgttgtgtattatatacccaaggccagttttatctaaatcaaaagatatttctaatattaatatttactacttcatgcaaagaaaatcagttacaactctgtatctttgattttttacttcattcattcatttattcatcacccttccacatagacaggttaaagcttaatttcacattttacaaaataatttgagttataccaattgactttattttctagtactccttcattgtagtttacatgtgtttctactaaatggaaatctttgaggctacaagttaataattaaaaatagagcaaggtaccacatgctcattcctccccttgttttcttttctttgattttcaaaatattcatctgcaaactttattgcatgtaagtacagtacctctttacatatgcaccacaactattttgtatgagctataaaacaactagaattaaaacttgtccaagaccccaaagcctgttcttcacaaaggaacctttcttgcccgattgttagaaagtgttttgaatgatgcataactaagtagagtaactaaacaattgcttttgagcatctggagcttgcccattaagatttctatagccctttattttcctttctgtggtttaagaagtgattcacattcaatatatgaaagttctgggttcagccccttgagcttttggtagaagaatcttcatgaatctaataaataaataaaacaaataatgtaagagctgaagacggttgagctcatgtgagtttatataccaaagcattttcttcctgggaagaaaaggtatcttctatatattttggtttcctaaatttagatctagaaatacaccattgttttgttagagtgtattcttagggtgtgtatgtggggaggcagattgtaagcaaccgattcaaaatttacctggaacttcatagaataatgtcaatgctttttaggtagaaaaatcattacctacaaataggggatacattatgaacgtatttcaactaagcaaaagcatagtcaagtgccttcataatgctaaattttagatgttgcactgatgagatattttccctacaaataaaagaccaaagtgtacaaaacctcaggacatgtggctgagttagaattacaatgcagctgtcatttttgcatttcctggctttcatgaatcattactagtgatcctctgtcatttaaatcagttgagaacatggatttatcttaattttcaccctttgtttccctttttcgtgataacagtttgagatatgatgatgtaaagtgtttctacttataatggtttcagccttgtcccttggcagcctaaatcttctggctaattcactgatcagttaaatagtcgaggttattattattataataattattttacatttatatagcactttcctccaaggggctcaaggcattttacacacagtaaattaccaaataggaattaatccttatatcaccctgtggggtaggtacagtcacataaatgaaattctacggaagtactgcctgtgtcacagtgctgagctctaccccaacccccagtgaacctgccctgcctacctgaagatgaagaatgctgttggcatggcagggaaaagctggaagaaagatcttgggaaaatggcccgctgtccttactttggtgctttgggctatctggaaaatgatactattgagagcagctaagcatgtcttgatatgcaatttacagataagtttcacctatatggttttatttaatcctgacacaagacaaggtgggatgtggttctcaaacttctgtgtgtatggaaatcacttgggagtgagtttaaaattcagattccaagaatttctagctcatggaggttctaataattcaagaaagggccattgacatctgaatttttgcctcagttgattttgagtcacgtgatgtttacccatattttgtgaaacttgagctgattaaggaagaattgttagtcccaatctacatatcagaaaatgatggctcaagcaggtaacatgtcacagtatttggcagaggctggactataaaccaagttttgaaattccaaaactcatactcttttaattacgctacagcgcttccaggaaagggaaaacagagaagccaatacaacaggatttaaatgtaaaggaaaggagagaacagttagatatgcatgtgagacactttacagtaaggtaggctggcgtctactggccctcttggaacctcgagttgatttgtgctgcctggatggagaagaccatcatcttttgggcagggctggactgttccttggcagcttgttccttggtttcagaactaccttgttccctgtagccaacaagtcagtcaactaactctaatccagcaagtacctgatggatttgcaatgtttaatttttcatcctgcccacaaaatgagtctcctccttaatagatgctgccaccaaaataaaagctggattttgccaggaaaccaagaaaagttcttttaataagcttcctgtttacgtgagtgggccctttatgggatgggatgggttttacgttttttatttgaagcattcttactccatttctaaaagagaaaaaaaattaacaggaagtggttatgagcaatttgactattatttttcaatttaatattccatttgaggtaatttcattcattttttttcttgaattaatttttattcagttttcttcaaaaactgggacaaggcattataggaaaaactatagacagacatactgcatccaaagtttttattctgttctgaacttcttactcagaagtgtgagaattccatggtggagtttagaggcgcttgtgggatttatttggggttttcagaaaccagaaaaacagacacgtggtgttactggtggtaaaaattcccacactctgtgtaaactcagcacagttttcagtaggtactactgtaaattgtattgagagactttccatgcccttccttttctcaaatgcatgtactccttaggtatggataataattattgctgttttagtgaaacattttgtgagtctctctaagatatcttttcattcttggaaattatcttctgcctctgaatttttcatcttttttttaacactctggttattcccagtcactgaacagaccgatcttatttaaaagggtctaataaccttttaacagtgaggtaaaaaaaaaaaatggcatttatttattggcagggaagggggagcgacaacaataagagagatacatttggaaaatataattgatatgatatccttgtaaaagcacattttgtatctttctcagcatcagccttttagaactatcagtttggatcccttcaagattattttatacctaggctagatcaagattttaccagaagcttaaactatttggggggtcctcttgaagaaaaagaatacaaaattatgattacagagttaagtacaggaccttggaaggggggctgcgcaagtgaaggtccctgaggtttaagctccattaaatatgcagtaaatctgcctctgcagatcccctttttgggctttacaaaagcacttttaataaatattactgtttcatataacaacaagattacttacagataataccctactttaaatgcgtagtctttaggttaaaaataataaaacatggtaaaaataatgcacgcctacttacaaacaatctaactaactgattccatgtagcgttcctctccatttattcaggctaaccctaacataatgtaggtcaacaaataccattagagcagacatctctgcatgtaccctggtatttcaagcaatacttgagacaataaactccagggcagcaaaaaatgtcaacagttccttcaagttctttgtaatgggattatagctgtgtaatgaaactaatatcagagactagagtaggctgcatttgacccattgtctcttttctctgtgttggaaagatgtaagacacatgggtgccccacagcattttgcttctaccacccatttttacacttaattatactgtttcttattgttcttcagttattttaagagggtttatgtttttctctagagcaagatagtaaccattttgagaacagaaattagactttttccccaaatattttacagtaccagaacattcctgctttctaccttttatttttctgcaccttgttctagaaataaattttagtggtggtctcttggtaggaggtacttggcagtttttaattgaacttctgtgaaaacctaaaactatctctaccttctctatctccatctccctgatcctagaacttcccttaaggtagaaaaaggcaagtgttttgaaggtaaatctagaaatttaaatggagaaaaggagggtgaaaaatattgccaactcagaaattactgagctttcattctttgtgaggctaatccagttattccacctcttatttcctcctcagtaagatatgattccctagtatcttcctaggaagtaaatttttggggttctaagtgtaaagaaataaagtcaacttttgcgaagccctcagtacagtttagtgcttgctaccactaaccaaagtagaattcaaacacaagagggtaattgcagaaatgagtaaatctgtacaacttcacattggtagtatccaaatgctcttatgaatgtcaacttcaggcatcctctttcattagaaaaatatgtgttgtctttgacagggaaacccttaaaaaaataaaatgtcacatatttgaattttagctgtattcataataattctcacaaacttttctcagaaaaaattttcttgattttcaaatttcctttatatttgttcttcctttcatatataattgacattctttaacagttgagaggtgctaggttaaatgtttgcagaataattgtggcttatttagaaaataaattttactctagggcttatgttgtgctaaaaatgactcatacagaaatggttctgcaactcttagctttagcctgatttgtcttcagagaggagttgtattagaaatgtggtgctatgttctgcacaaatgaatgtttgcggtacatatggaaaatactatgcacaggaaaaaaaactggtcctagaaaaaatgactttaactttgcataactcatttgggctagtttttttttttttaatgtgttcactgcttttataaaccatttcagaatgtctccatagcaggataatgttgcatagtcgatgacttcatatttttatacctcctggaattcaaagggaatattagtctggttggttcagtaatctaaaattattggtttataataatgggcataagaagctttcaaacaactacctgttttaccagttttttccttagtatggtatccagatttgtcagtttatatatttttgaagtagttccctctaaggtgtcttctttaactgttagactatcccataggctgagtgtcttacgtgttgatgtggctgatggtttaaggccagtggctctcagatgttagtttagcacagggtttttcaacagtggcactatgatactttggagtagataattctttgccgggatgcagggtagatgtctgttctgtgcactgtaggatgtttagtggtatttctgacctctccccattggagcacccctcagtttggattatcaaaattgtctccagatgttgccagttctcccctggtggggaagggggtggcaaaattgtcccccagttaagaaccactgaattggtagtatatattactggagtgaaccacaactacagttttgttgttgttgttcacttgtttgcttttgtttttgttgtttataatggagtatagaaaaatctgatccgatctgaagaaagctggtagctctcaactgagaatttcttccatagaactatgatgtgtgtaaatgttgaatcacataggcagacctcagagcttcctttaatgacttatgtgttagagaaagggttctaagattctgcatagatgtatattttatactttttatttatttattggtctcgttattactatggtgatctttctgaaaggcagactaagctggcacactgctattgacttaacaattaaattcccctttcaacatctcctgcctcaaatagtttaatagttgatattttacccttagaagcacctagctaaagagagacctagtgaaaactaaaaccaacaggtaaattaatcttggctttggggcaggaagatggcagttacacaaacaaggttttattccactgattttaggggatcagaacctggaaatgaaaattggagattacttgtcaaacaaagggaccaaagctctgcttaatttaattaacctgatttcaagtacttcaaagacccagaaaggcaacttattattgacagtatgaaacccactaatcctcatagtaaccataggagcagggtactattattgtgctgttctgactgatgatgaaactgaagtactgagaagttaagtggcttgcccaacgtcatacagtgtgtaagagacagaggcaagttccaaatcaggcagtactccacagtcatcttttaaggtcctttaaaatatgctagaatttaaagggaaactgacgggctggatttcagacatctatgtacaggatatttatccaaaagaataaatcaagaaaataatataccctttacatttaaggaagaagaataatctgaaagaaaggattacatatttaataatcaactatgttataatcatagtacacaatttttaaaatatgtaacacaaaattttcatggaatttatcagaaatgttgacagagtcttatagcattttataatccccatttccatttgaggattgagagaatattattttgcttgtgagcatgtgggcctgtaacagatgatttccactctccattaactatcaaataatgctacctctcattaatacatttttcccagaaaacacaggaacttggataataaataaatcagactttattttattttcaaaaaagtatacatttcttaacactcttatgccatatcctctacaaaattcctaaatctggaatatagttgttgaaagagcatcttgatatttataattttctaagcatcattattacctaacacataaatgcctttagttattagtttataccctgataatagccactaaatcttttgtgtcatgttttttgattatccataattttcttaaaaagccaaaatgatgtcttacccaattctctaacttgttggctggaggttaggctgccataaatctgtagcataagaagaacagaagggtgggcagttggaaagtatagtatggacccatttcttttaaaacgtgttaatcattgcagcctgcaatcagatcacattgaggttcatatcagaataagttgattcaattcactggctctctttaagtctaataacacttgtgtttctagaagtaataaaattatatatgtaggcatattttttaaaagttattttgtttacagatgtgctctgtttatcatgaacctagcaatttgtgttttatcccatttatgcctagtgttccattattggaacgctaagcatggaggagttatttatatcctactgctcaaggtcatcgccatggtctgattgcagaaattcaaagaaattgcaacctcaggcatagatgggttaaggggcacgattacagtgtaggaaggaaattttgatgcagcttttaaaaagtagagaacttttcattttacgcttttacacatttcatatgtaatctagaatatcaccaaagcttttattgccttctatctatttttaaaataatcttgtccagcccatatctgtttttagtatttgcatctcacaggaaaaggaactggtggtatgactctttgcaaagcattgttctgtggaatttcaacccatagaaacgagacaccacgttctctgtagtctgtcctatctctaaagggaacctcatggacagttttaaaacagaaagtgaacagtttatcacacattctagttactctaaaacctcttttaatgtacctcctggttctttgcaagtgaaaagaaaaatgcttcctctcttatttaagaagtcttcagcaacttaccaatccctagcatgtgcaaaatcacaagactatataggatcactgttcttagattctgaatttggaattcctgataactgaaccatgattttcaaataaaaagaagggttttgaagtctatcaccacttactagaagtttttattggcaaagaaagatcacacttctttctgtctgcatacaaaaagaaatagctaatctcctttgttgccaggtgaattaactgtattcagaggaaataggcaaacttgtagaagaaagtctaacagattttttagaattctttcatgatatgatagaaatattatggtttatatcaggtgaaccactgttaacttgtaaaatttctactgaggcaaggaaatcaaatcatttcttgattgtagaaagtgtattataacactggtgctgttggatgccaactctagatagcactactaccgctactaagaactatacagtcttttggcttctcacagggaaatagacaaagggaaaagggaaataagtcaggaaaaacggatgagaaaggagatagattagagacttggatgtacagccatgatagataacccccagcgaaaatcagagaatgcaagggacaaaggaagcatgcggtccatttaggatagtgacaatagctaaaggattccatttgatcttaccagattggcacagctggaggaggcacgcaataaaactccgcccaataaataaacaaaggtaaacacccaaagctacaatattgctatcttataaactcagagcgtgggaaaaattagacttattagaaagcttccatggcagtcagtcactaagaaatgtcagtgtgatgtctgttaagtaacatttattaacaagcgtgtttgtttgctttttctcatgttcaatgaattgttataataccgcaaaataatttgttctctactaatgcagattattttaatctaccttaaactctttaatgactgtcctgtgtaagacaccctgagttgttatgttataggaacatggcatttgaagtacagatagtttcacataattgcagagggtttaatataagggaattataaaccttattttcattactttacttaatgagtgccaaaattttgaaggcctttttgcctgaaagagctcatagcctttaagtccctttcctaggtaagacttataattaaactagacatgcatcacttgatgatggggatacaatctgagaaatgcatccttaggcaatttcatcattgtggaaacatcatagagtgtacttaaacaaacctagatggtatatactactaacatataggctatatagtataacttattgctcctaggccataaaccttataaacctgtacagtatgttactgaactgaatactgtaggcaattgtaacagagtagatggtaagtatttacatatgtaaacatatctaaacatagaaaaggtacagcaaaaatacagtattataatctatgggaccaccatggtatagatatatgtggttcattgttgaccaaaatgtcattacacggcaaacgactgtatttgaatattttgtttttctctatttgcactggcacctttctgcacacctggataaatattgtgttccatcagtttagcttttccttgctcagaaaagtttcattccatcaacatttttggataatttattttacattccttgttccagattattcattcagcaaaaattaattgtgcttctgctatgtatatgcaagaccctggaataagtaagtcattttgatagatgttaagcaagtttagtcctattaccagttcctagggaatcctaacttgttctgtatatgtaccactgcccattttcctttaactttctctaagcctttttttgttttcttttctttgtgatattacacaaaaaccatgagtaccccagttttctctctttcatcctatgctgcatatataaagcagctgctcagtggctcacagatgcaaacttaccacagtagatatcggcctaggctagtacgtgtgtgtgtgtgtgtgtgtgtgttggggaggtgggcaaataatagacctatgagacctgttccctacagatgcaattcaagtagtgcttcaagaagaattgtacacaaaaatacttttatttctttctgccgccatcctttggttagttttattgtaatgactggctgcatagtgacaggttgatacagtactacttttgtttctaaactccaatattgtttaatcctgttctccttcttaagccagttatatttacaggctcttagttccttggttaccagcattaatcctaatgttctgtctaaagtatagtagtgattttcttatacttcagttcactacaatgtttgtgtggtagttgccataagtaatgattttgctttactccttaccagggcaaccacaaacttgacagtggttcaaaatctcaggttttgcaaggggttgtgagagattatatgtagcctcagggaagtcttaaaatgctcagattaattgtctagatacaagttcatgagtctcatgaacatttactttagatttagaaggaactctgaaatcactaaattactactaaatgtcagggtaaaccacttggttttactggagaaaaatgacatctacttaagaagcaaaatcctgtctcgttgatctgtctaatgttgacagtggggtgttaaagtctcccattattaatgtgtgggagtctaagtctctttgtaggtcactcaggacttgctttatgaatctgggtgctcctgtattgggtgcatatatatttaggatagttagctcctcttgttgaattgatccctttaccattatgtaatggccttctttatctcttttgatctttgttggtttaaagtctgttttatcagagactaggattgcaacccctgccttttttagttttccatttgcttggtagatcttcctccatccttttattttgagcctatgtgtgtctctgcacgtgagatgggtttcctgaatatagcacactgatgggtcttgactctttatccaacttgccagtctgtgtcttttaattggagaatttagtccatttacatttaaagttaatattgttatgtgtggatttgatcctgtcattatgatgttagctggtgattttgctcgttagttgatgcagtttcttcctagtctcgatggtctttacattttggcatgattttgcagcggctggtaccggttgttcctttccatgtttagcgcttccttcaggagctcttttagggcaggcttggtggtgacaaaatctctcagcatttgcttgtctgtaaagtattttatttctccttcacttatgaagcatagtttggctggatatgaaattctgggttgaaaattcttttctttaagaatgttgaatattggcccccactctcttctggcttgtagggtttctgccgagagatccgctgttagtctgatgggcttccctttgagggtaacccgacctttctctctggctgcccttaacattttttccttcatttcaactttggtgaatctgacaattgtgtgtcttggagttgctcttctcgaggagtatctttgtggcgttctctgtatttcctgaatctgaacgttggcctgccttgctagattggggaagttctcctggataatatcctgcagagtgttttccaacttggttccattctccacatcactttcaggtacaccaatcagacgtagattaaactaaagagcttctgcacagcaaaagaaactaccatcagagtgaacaggcaacctacaacatgggagaaaattttcacaacctactcatggctaatatccagaatctacaatgaactcaaacaaatttacaagaaaaaaacaaacaaccccatcaaaaagtgggcgaaggacatgaacagacacttctcaaaagaagacatttatgcagccaaaaaacacatgaaaaaatgctcatcatcactggccatcagagaaatgcaaatcaaaaccactatgagatatcatctcacaccagttagaatggcaatcattaaaaagtcaggaaacaacaggtgctggagaggatgtggagaaataggaacacttttacactgttggtgggactgtaaactagttcaaccattgtggaagtgagtgtggcgattcctcagggatctagaactagaaataccatttgacccagccatcccattactgggtatatacccaaaggactataaatcatgctgctataaagacacatgcacatgtatgtttattgcggcattattcacaatagcaaagacttggaaccaacccaaatgtccaacaatgatagactggattaagaaaatgtggcatatatacaccatggaatactatgcagccataaaaaatgatgagttcgtatcctttgtagggacatggatgaaattggaaatcatcattctcagtaaactatcgcaagaacaaaaaaccaaacaccgtatattctcactcataggtgggaattgaacaatgagatcacatggacacatgaaggggaataccacactctggggactgtggtggggtggggggaggggggagggatagcattgggagatatacctaaggctagatgacgagttagtgggtgcagtgcaccagcatggcacatgtatacatatgtaactaacctgcacaatgtgcacatgtagcctaaaacttaaagtataattaaaaaaaaaaagagaagcaaaatcctaatctcagagataaagttaatgtagaatggcacatgcaagggctgaatccatgaaactcgtgaaaataattttggcctctgtagaattcgtttcatatagttgctctttcctttcccaaagtcacattataggcaagtttttatttattcacatgagtagacaaactcatgaaatggtttcaagcagcaaatggttttggaagccaggcagagtaaactaatttttgatttataaatgtgctgtggtgctaaagaatggctgcattaacaatccactttaataaggaatcagggatttgaggataagaagccaaaatgggtgaaggagaacaacagtgctaagagcaaatgacatgttcgaaaagtaaacttcttcatttgaaggaagattatgcaaaatccagcttgaaaataatgaatgagaaatctaacttgatatgtttaacagaggtggttgatagaaggtcttgaattggctctgaaaaggctattactaaatatgggaagaacgggattcacatctccaaaaatcacatctttcgatttttatttatgcccagcaaagatagcaagaaggtacgtttctctccctcattaccaaagctttttttctttcttaccctttttttgtgtgcccagactatgaatctgttaactaggcagggtcattttcgtgagctttcctaatgccaagagacaccaaatgttgaggtagatcaaagggacaaagaattacagagacactgagccacttttcttaggaccctgagtacaatgtgaacagtctacttagctccaggccccaaaccaagtattctgcagcacacccagtctggatttcttgggaagtgctccctgttgcttttcatagtttagataatccacatgaacaatcctgattaaatcagttgcccctaggcaatggggaaaagcataaatggctttttggagagagaggtccaaaagcttctctctctcacttgctgtctctctctccaccccccatccacccgccccatctatttatctagttccttgtgttttcatttattcattttcttctccaaaattatcttcatccaatgcaattaggtaagaagagggtactattgaaaaaaatgctgatccctattcattaaatgattcaggttttaattttaaattacatgacctgtcttgttgtgctgattatgaacagtttttgaaaggctgttatccagggggtggttatccagcgatattatggaaggtcactaggcatttgttttttatgtctgattcttttttaaccaggcaattactctatcatttaataatccttacctcaaagttcacttgaaagaaagctcataagatttaaaggggaaaaaaaatccctaaaaataaaagttaggctaggctaggccagggtgggaaattccattgtggctagaagcccatggcaggtagagtggaatttaatgaaggaaactgctgtgtttttgtgtctttctgtatgtttttcctttaaaaccaagagctgggcaggcatcccattcgacctgacgtgacccaagcaaattgcttcttatataaaaacaactgcagactttgagaatgtgaaaatgcactgtatccttctccaaccgagggaaacgaaagcctgagaaacaggacggccctgtcaatactcgttgagcagaactatcactcaaacttgataaagggagattagaacaggctccctaatgccagaggtattcattataagttggagttctttatttattttttattttcttaaacaagcacaagtggtcaatggaaaatacatttttacaaggcaggttttcctgcaggaaacaaaagtaggcacaatttttcaaagtcttttcatggaactagaatttttaaaaaatttttaataataatattaaataagaaaagacaaagagaatcatttcccttttctaccacagtcttggacaagcaaagaagaagagattcagggtgtgtccactgatattgcattcagatgtgttgtcttggcttctgtactgacagatttatttaaaaaacaaagtttttaaaatgcattgtgtgctagtgaagtcacttcataaatcttttcctttatgaattattttgatcacaaggcttgttgtttaaatcactgaaagactgttctccctaaaagaaaaatgccttcgttttcaaaccgccagttcaaaagccagtaacttcccctgaacagcatgcagggagccagagggcaaagaacaagggaccaagtaagttctgactccagcataaggcataatccagtttagatttgccgtggttcacagaagagccatgttttaaacatttggacccagagctcttacttttctcatagattacttagtttgaaatggtgactctgcttcaggaaaaaaacaaacaggggaacacagcctttgatgcagctggtctgtcagagggcggaaagttagaattagaatattcttcaagctgttgctgaataatgaagggtagggcttcctagttgggcagttaccacagcccctctgggagttcagagaacaaatattacctaatgtgtacaaagactttaaaagttaagttgattacaagctgagtgaggaaggttagataaggcagtgagaactgagttccaccagagggacctgatcttcaggaacactgccaggagccacagggctccatttgaccctctagagttaaaggattgggtaccaacaggaagttagttaggttcttgaagcgaatagtctgtgtgaaattactacaaggaagaaagaaaagcaaaacaaaatattggaatatatgcatacatagaggttgacgagataacctggatgaagattatgactgtgagatgggtcaaaatctccccaaccaaaatgtaatgtgcttgtaaccagaagaccttgtgttgctattcatttgtttttggcacagcacctagaatgttgttaagacatacaagcaaataattaatactggtctattacattaatttgccaggataattggtctggtggaagggtagatggttccagattaaacatgggaagagatgaatgtctagaagaaatgaatttgaaactgagatctaaaggacaagaatgatggacagaagtgaacaggctgtctcaggttcattgattgagagatgcttcttggctattcactgcttcaattgttattctccattttatggctgctccatgaaaatgaacaagaaaggcacggagatgatagagagcaagtttacatgatagaggaagaaagttgttaacatgggagatgggaaagaacattaataggtgatgtatattcttagaaaaaatgatgactgctgtggatgagttttatctcaattctgagcaggtagttagagggaatggttggaatttaactctggagtctgatggcctgggatactttgtagttttgtgatctacaaaataatgttacaatactatttttaaaaattgttatgaaaattatataagttcatatatataaactacttagcaaatgcttctcttagaatgacttaaaaaataatgaagataagagttatccattttccctacacaactgtaccacatgttcaacttctctgtcatgattagaaatatcacataccactgatctcccaagcaagttcattaaggtagttttctttacatacaggtctgtttcattttattcacagattattctgctaaatttaattatagaaatattcattggccatatttagcgactgagtggaatatatagcactttcctagggcactatgagtgatttttttaaggttaaaaaatagtcttgtctcaattttaaaatactgaatattgagagaggaagccctatagacactttgattctaatgcagttttccatatcagttcaagtgctatctaacataaaaccacaattttggtagttgtgattttggtaataaaggagtaacttgtactgtttcaggacaaatatttccacagataacagttccaaaccatggtatgggttaaaaataaaactaaactccaattaaaaacttaaaaaaaaaacaccacaattatttgaaggcaccggagagtgaccaaaagcagttggaatctggagtgaactgtcccgggtaaaattcacgtttgttacagcttcttccctcaaggaacttcccagtctgtatggtatagagaagttagaattcaggcagaaaaccacaatcttattggtttgtgatgttagcgaatggagctggcattggcaaagtagctgaaattgaggaaggaagtattagaaaggatggagccatcgagggaaggctcccatgaatctacatataagttaccctaacattctggctgatataaactgtgcatgtatgtgggagcctataagtgcctggagaaaagcaacaactagaaagctaaaagagctgaacagatacattagatgaagaggagacaaagttaggagtttgagtttacaaagttagaagggtttggtaaatgtctcaggctttatgaatcccagaaggatcaaaccttagaaatatagatgatagctaagaactaagaaattaattatagaaagagagacaaacctgaagcattgaaagtttctgtcaaataataaaaccagtcctcttcaaatcaaagtggtcgactagtaatttaataacctgctagaagaaaaatgcattgcattagagaaagataaccaaacccagagtttgtataaatatcatgcacaatgttcaactgtaattcaaaaattaccagtgatggatacagaaaaatgtgacatgtaatttttttttaaagtccatggaaatagattcctcgatgattcagaagttgtagacaaggactttaaagcagaaattataaatatattcaggattttaaaaaaatatgttttcaggcccggtgcggtagctcacgcctataatccaccagatgtggtggcgtatgcttataatcccagctactcagaaggctgaggcatgagaatagatagcttgaacccaggaggtggaggttgcagtgagccgagattgctccactgcactctagcctgggcaacagagtgagaccctgtctctaaaaatatatgtatatatatagtcataatgagggaacagatgagaaaataagcagagaaatgaaaattttcaaaaataagtaaaaagttaaggtataatacctgaaatttttttgaagagtcattgaagtggcttaacaatagattgtagatggcagaagaaagtgtcagtaaacttgaatacaggtcaatagaaattattaatgtaaagaacagagagaaaaaggattcaaaaatgtgcagagtgatctgtacaacaatatcaaccagtccactatactttgcatgtctcagaagaagaaaaaagaaatgaaattactaaaaagaaccaaaggttaaagtacagaatctgaaataaaaaatgatttgttggagaatcttaacagcagattgtgggtggcagatgagaaaatgggacagaaatgatatttgaggaaatcatagctgaaaatgtccaaaatttgctgagaaaaaacacaaaaatatgcaaagaaaatcacatgtaggcactgtattcaaacttctgtacaccaaagatacaaagaaaaatctcaaaggcagccctaagggtggaaacaatagatcacctacaggggaataatcaaacatcgactcattcctcatactaaatgtaatgccatttcttaatgattgaaaagaaaaacaactgcaaaaccagaattttatgtagagcaatgtgatcttgcaataatgaagaaatgaattttctgttgtcagtggaattcctataagtagtgtgaaaggcagtgagtgcttcagggtgaagggaaatgacactatgaaccaagatagaaacttgtttttacagaaaattttcactaaaaattttaaagtatctatttacatgtaaaagaatatccttttattcttttaatttctttaaaagaaaaactgactaatgcataaattatagtattttctcatgagtctatagtacttgcagatatgaagtatgtaaaaatactacaaagtactgggtggcagtaaatgaaattatacttataagatactcacatttgcataaagtggtaaaatattaactctgtgtaaacagtgataattaaagaggcatattgtaatccttagaacaactgctaaaaaataacaaaaaaggtacagctaaaaagccagttgtgcaattgaatggaaaaataattgatcagtttaactcattaaaaaaggaaaggaaggccgggcgcggtggctcacgcctgtaatcccagcactttgggaggccgaggcgggtggatcatgaggtcaggagatcgagaccatcctggctaacaaggtgaaaccccgtctctactaaaaatacaaaaaattagccgggcgcggtggcgggcgcctgtagtcccagctactggggaggctgaggcaggagaatggcgtgaacccgggaagcggagcttgcagtgagccgagattgcgccactgcagtccgcagtctggcctgggcgacaaagcgagactccgtctcaaaaaaaaaaaaaaaaaaaaaggaaaggaaaacagaagaataacaatgacaaaaacccaaaagaaaaaaatcaaaagcatataatgaaataaatggtagacctaaacttaattgtagcaataattccattcactgtaaatggtataaatactacaattaaaagagagagtattaggctgaataaaaaggcaagagtcaacatatgctgtctacaggaatacactttaaatgtaataacatggatatcttgagagtgaaaagatagaaagatatatacaatgcaaacaataagcatgagaaagctaggttggaatattaatattacaaagaatagactttatgccaaggagtactattagagataaggagggatatttcctaatcatatgtgtgaaattatcatgaatgcataagtcataaacatgtagacacaaactgacagaaaactagagagaaatagtaaaatctacaataacaattggagattttaacattcttgttctagaacttgatagaacaaataggcagaaaatcagtaagaatacacaagaaattaaaaacaccatcaactgccttgacctgtttgatgtttacagaacactattcccacttggagaatgtgttctattcccacctggagaatatgtgttctttaaaacatatttaaaacatacaggaatagagtcctgtatgtatgttctactttatttattaaagtagaccctaatctggttcatcaaatgagtttcaaacattttcaaaagattgagatactacaaaatatgcttcttgtttataattaattaaattagaaataaaaaaagaaaacaataaaatatctagaaaagaccagttggaaactacacaacaaacttaatacctcatggttgaaagtcatgaaattttaaaataattaaattaagttatgcagtatattgaaatttatgaaactgattaaatgaaaatacaatatattgacatttataatatgagccagagagaagcttagcagaaattttgagcttttaatcctaaattagaaggaagaagaaaggtttaagatcaatagcgtaggtttccactttaagaaagtgggaaagtataatcattttaaacccaaaagcagtaaaaaaagaaaacaaataacaaaggcagaaaactgtgaaataaaaacaaactacaaagaagattaatgaaagcaaaacatgaatatttgaaaagattaacagaatttataagctataacagaaaagttcaagaaaaaagagatgatacaaattatgaatatcagtaatgagagattatcattacatatcataacaatattaaaggataacaagggaatattatgaaaacttcatgtcaataatttcaacaactttgataaaataggtaaatttatttaaaaacatattaacaaaactggcatagtaaaccaaagaaatcaaaatattcctttattgattaaagaaattgaatttgtcgtcaaaagcattcctaaaaaaagaacttcaggtttagatagtttccctggagaattctatataacatttaaggaggaaataatattaatcctacacggactctttcagaaaacataggaggtaaaaacaaaacacttcctgatttatgagacaggcataatcccaacagcaaaacctgacagatattacaggaaaataaaagtataggccaatattcctcatggttctaggcacaataatctttaacaaaatattagcaaacaaacttcaacaataaaaagtaaaaagtataatacctcatgatcaagtaggatttatctcagaaaagcaactttagtttaacgtttgaaaataaatcactgtaaatgcatcctaataaagaagaaaaatatgatctcaatagatgcagaaaaagcaattgaaaaaatttgacagtcattcacagtgaaaactctcagaaaattagaacagattgaaacttcctcaatctgatgaagggcctctatgaaaacatataattaataccgtccttaatgataaaatctgaatgctttcctcctgggatatagtagaaggcaaagatatatattcttactacttctgttcagcgttgttctaaagatcctagccagagcaataagacgagtaaaataaattaaaggtataagcataggaaaggaagaagtaacattgtgtttattcacaaataccatgattgtttacattagaaactcttaggggatatacaaaacaactaatagagctaacagtgcatttaggaaggtcacaagatcaatatacaaaaattgattgcatttatgtagtaccggcaaataatttgaaaatgaagttttaaaatcaatttacagtagcctataaatataagacatttaaataaaagtttaacaaaagaatgtaagattccccactcaaaattttaaaaggccttagagaaaaatccgttatttatagatgaatactcagtatttctaaagtgtcatttttccccaaattatctgtagattcaatgcaatcaccatcaaaatatcaacatcttgtttttctaacattaagataaattgtcaaatttattttaaaatgtatatgagattgcagaaaacttagaaaaagaataaagttgaaagactcacattacctaatttcaagactttctgtaaatatatagttctactttggaacattggatcagtatcttctaaggttaagcatatgcctaccatattgtttggtaattacattcctagttatttaccaaaaaataatgaaaataatgccctcaaaaagatttgtacaggcaagtttatactgactttatttgtaattgcctaaaactggaagcacccaaatgtggaaagtggatatacaaattgtggtatattcatataatgaaatactaacaagcaaataaaacaaaacagagtatgatacaacaatgtagatgaattccagaaacatggtatgcagaagagccaggacacaagagtatacataagttatgtgaaggcgaaactattctatcgtgataaaaatcagaatgctggttgtttatgggagatagaaattaactggaagggggcacaaaggaactttctatgtctctgttatggtggtaaatatatacatttttatatatacatatttatacataggtgtataaatttatcaaaatcaaaactcattctgtgtacattttgaagtccatgaattttgctgaatataaattatacctcaactctgaaaaatttcatgttgaccctaatcaactctcacctgaagtgcttcatctattttcctaatggctaccctggtccctgtcctaattaaccttcaaagctgttttaaaacttttctcttctgcctattgctctgattccaagagatgtggtagaatgtaaattgtcaagatttggaaatctggagaatgttcaaggttaaagacagaaatatctaattaacaagcccagatacagccttggacagtcgaacgcttgggcaagtgttcactgctcgtgttcacttttctcttttgtgaatgatactgctttctaaatatattttatttcttgagcaagagggagaaaagaggagtccttcaaatttactttttgttttgttgcatattgcaaagttaatatcaaactctaggtttaaaacttcaaagaatgtcaggactttttcgtttttccttttttttttttttttttttttactatccaaccaagggttttacttattccctggatttctctatacttttaaattgtcaaagccaaagaaaagaataattaaaatattcaaagctgaaaataagcaagatttcagtttattttcaaatataagcttaccacttccctgcatttaactgtgatactagtgttctggcaatattacatatgattgagaattctgtttacctaaaccacttttttattgttgtttttagctttcttaagtgccatcaggtcttgtcttctttcatttctttctagctgtccccaacaaatactgcccaagtctgattgtaatgcagcctttctttcatagtgaatatttattaaagcacttaatacctgaattatgaaatgtagacaagtgcacattaacctggctgagttatttcctttcttgttctttttaaacacatattctagcccagtctatcaatgccagatggcaactacattttgatacactgaatatttaccaagtcatgtggtatgcttttgaagtattttttaaaccctttccatcaaacgagctgactcatctctcattcatttattcctgcttttaacaagttgtatttttagaaacttgacctcagttttatcaaaatgataaatgatattgtaaaatgatgcatccgaagttctacaggcctgactacactttacatcctacagctatcacgtttatttttcagtgtttaaaatgttataatgtaccaattttcttattttcatgaaacttgactccaactagattattgtgttagcacagaggaatataatgggagaatatttatacttagacagctttaagatattcaggaaattaaaagcatttatggttgaaataattttaaatgaccatgaaaatagcaacttaacaactgatatttatgtccaagacctttaaaaagcctactggtaataggcagtaggtctaataataatagtaggaagaagatgaagaagactaaaaggctgtcagaatactgactccctgctatgttttttgttttcttgatcttcatgggaatatgcttttgtgggggaaactgttagaatatttttttgtaaatagatgttaatatttcttaatctagggatattaaaaataacaggagaaagtattgacagacaaaagtgcatggcattgaaaatggttagtaaaggccaatgcatattcttagaactcttcctggcctgttgatctctaaagattattttcaattttttaagtttttatggctacttttcaatggtctttcagaaatagatgatattatgcatgttatgaagttaataataatgctttatataaacgagtggaagttttctttgtgaataattttttcagaatttttacagtgttttttcttttaaaaagcagacaatagggatatttggagagattaaaactgagaaacatgaaaggatctattcagttttacaaaaaatctttcatgatactcttatccattttattttctagctctctttgtaattgaaattgtttctctcttgtgtgtggcagagtttgtgtagtgcctagtctggagtagcttctcaaaagcacagattgccttaataatattagtgtatataaattcaaagcatggtgcccaaaatgtagtgtatattgttgttatattattattgctgttgttcttatgactgcttttaaagggaaatctccaatcagccttttaatgttatctcatttagcttatgcttttataaaagatttggaaaatatataatttacctagtgtaaatttaaaggaatgtgacttggtcaaaagagacattctagaggcaaaccaacaacaacaatactgaattcattaaagtttggattagaatttgttttttttctatatatagaaagcttgagatcaaataaattctattcctatgacacatgtggaatttctctctctgaaggtgttgtcagcttattcacctatatgaccccctaaaagaggaagtacatcctgatgaagtacacccatgagtcacaaagcagagacttgagtccattatgcactcttttaggatttgtagatctgcaacattgttagtggtttctttagaaaagaatcccatggaactctacattcttttattaaatgagcccagaagattttctacttaccctttcacttttaatagcccttttgtgtgtaatcagcttctcaagaactggaatttttagagtatatcttctttattttatgagtttcacttgaatgtttctaacttcatggagactcatctgattgaatggtaacattttgtattcaggcagcaagggattttgtagtgaaaacattgtggtggacacccaaaaaataagatttctaatatagtttatagtgtatttttctccttaaagttaacaatgaaggaatagtgtatctttttggctcctctgtcaaattaaactgtggggtaattaaatcattgtattatttgggaagaaagaaaatgggtggacatagattaaatttttaaatggtgagctacttcaaatacaacgaggatcattttatttagtaacgtataggtcaacttcttaaaactatattatttttaagcctttaaatatttaatttctgggtcagctgattagtcaaaagagtagaagctagaataaataatatttgccttagtttcattttaggaaacactactttccatatctgcatagtttgagttagttgcctttgggttgaaatttaatgataatcctctgacagtgtcaatgatcttcctctgctatactttgaaccttgaaatacattgagacaaattccagtagggctaacatgttttgtttttcttaattttctctgtatttcagatcaaatttcactcctctgttatactcttattcttctagatttttatgtacaatttatcaaatgctatcttttagggggtagcctttccatcttgtgtaatataatattattattgcagatagcacaaattagtagttaacagtacacttttatgaatgacactttctaaatttaagatgccatcatgccatcattctgttctatcagtgctttggaagattgtgtggatatggcaagttttcctttaataaataaagattattatgtcttctcgtttatctggtgacacttagctcattaaatctttgaaattattaattttaagaatgtatataaaatgcttagcaaaatgtattacacagtaagcactccacaaatggtttctattattattatgtataacatgtttatagctattaatgatatttaaaataccaataatagtgtaattactacaatgcctactagtaatgaataataaatattaattataattaattgttttctcaataaattttttattgatgagtaataagaggataatggaatgtcataatacattctatactacagtaaaatcaactagtcaaaacatagcacaaaatacatttaatgtaaaataatttagttaaaatttgcataccatgtgattgtggaaaatgtctaaaaggttaactttaataatctagaaaagttttatgtttcttatagttctgatctttagttattttccaatgacagaagttggagattaatcatttttcttctactcctaatgttttctcaattggaagattaaagagatgtcaacgaagtatcacctgattatttatcaagtgattgttacagagactgagtgccctcaggattacatatctttttttttctctcccacaattgtcatgattactagccaaatccaattagagagatactagagaagtactgagtatttactgagtacttacacattgtatatgtaatacaggtttcatagataatcacctctttagaaatgactggactataaagaggttggctaatgtattcaagatcacaccaataataaatagtggagtttgattttaaattgatggctgactgactctaaactcatgctttttcacattgcttctttcactcaacctaaggaaattgccaaaagttttggtcagaagctaacctcactttggacttttgagaactccaagctgccacccatggcttcatatttttggttatttgaatctttgaggaagagctctagagatagagagaggaaagaaaggaagaatataaggaaggaaatggtgaacatttctctctaatttcctctctatgataattttacctttattcccaagaggaacaatgtgaaagttctactttcttgagaagtataaaactgccttggccgggcttggtggctcacgcctgtaatcccagcattttgggaggccaaggcgggtggattacaaggtcaggagatcgagaccatcctggttaacacgatgaaagccagtctctactaaaaatacaaaaaattagctgggcgtggtggcaggtgcctgtggtcccagctactcgggaggctgaggcaggagaatggcatgaacccgggaggcagagcttgcagttagccaagatcgcgccactgcactccagcctgggcaacagagcaagactctgtctaaaaaaaaataaataaataaaataaaataaaataaaactgccttgattaagtaccttcaaatcagtgattaactagcaactctagccctgaattctgaatcttttatttttccttcaaaaggtaactcttaaaccatcccttctacttaatctgcatattgtactgaggttatttatcttccaacgtttgccagttcccttaggaatacccttagcaaccgcctttccatacaaattgcctgggaaagtttaaggggatcaaatcccttgtaactaaacaaaatagggcttttgaatagaaatttaatagcaaattagattggcatcattacaggaggatgaatgaaacttttgttttctttacatttacagtagaaaagtcaactaactctccaatatacaatgagctggaagagagagattttttttggcttattttatgatgtgtcttgctttcaccacattctgtcaacttccacaacaaatttaacctccaaaacaaatcttaaacctggtctctctcactcactgctgctccatttttcctaatggagttttctcttggaagaaggagttttcatcagaagaaaggagtctcctccttctccaaatacaaactctacctacacagaagaaaaatgtatctttcgttctctgtaaactagggcttctacttttcttcatctctacataaaagtttttcaaacttcttccatccaccagtcctactgagtgagggcatcaaggacagggtttgcaatggtaacctcctgtttcacccacagacccctactttcctcccatttagctgcttttcacataacgcttcttttttctgtagaggttttataaaaaaagattgagaaaaaattatttctaaaatgtttatgctctatttttaataaaggaactcagtaaatgactaaggccaaaaagttgactcttctttatcagtactccctatcataataattctgcaaaactgctttattcttttctgaccttctctgtgctttggactttatgccatagttgagggctgtgtttcatcaatgtttcttttccctctgttcctcgaagcaacataatttgtttggcaaaaaactaagaatgaaatatctcctgctttatagatagtttttatacaacattctttgtaattgtgtaaagtctgagaattgtgtctaatgaaatatctggtaaaggcaaatggtaaataaattctcatttaattgataaaattaatttggtttctccataataaaagtatacttgtattagaagtctacttagtttaaggagtcacattacatctccatgactcaacattcccctttgaggcactgggggaaaaatccaatagtaataccaaaataaaataactttgaccctcaacaatgctatgcattgtaaactgatgccacccagaaagatgtaaggaaacagctggctgaaactacagttgaagcatctctggaattaacaaataaagccaatttctggataacaagacaaattgatatagtcagtcttcgagtgattgggaagaaggtgagaggtgaggttgagagatcctcaccatttgcctatataattaatttgccagtaatgctttcagtgatattcataaaggtttgaggtaaatattaagtaatcacatatagtaattatttattagtgaatgggtttgagaacagttggtagtaaagaaaatttctgtaaatagatataatttacacaaaaatatatgaactcttaaacaaaagatgatcttttgtattaactcgccaatatagtctcctacaattggtccttccaaacactaacattttatttttatatggatggctcttactgtaatttcgtatgtctttaaactttgtaatagttcaacgaacatcgtggagctcatagtgtgtgtgtgcaataaactatattatattaataataaatgtatatgatttattacagtatgtccttgaatattcattatccttagggactatacattatccttagggaaagaaaaaaatttaatttctagattagttttctgtttattctttcattttcagagctagtgaattcatttaaattatatcctaaatattctttatcctgactacccacaactacataattctgtgatatgagggattagttccatctttattaaaatttcaacttttattttagatacagagggtgcatatgcagatttagtccataggaatattgtgtgatgctgaggtttggaataggaatcccaccctaattcctatggtaatgagcacagtacctaataggtaggactagtttacattcccaccaacaatgtgtaagcattccctctcctccacaatcatgcagcacctgttgttctttgattttttaacaacagccattctgactggtataagatggtatttcattgtggttttgacttgcgtttctctgatgattagtaatgctgagcgtttattgacaaccgtggcaacatcaataattagacacaaaatgaatgaactgcagtgatggcaatgatataaatgaaccataacataacctgtaactcttaaattccaaacatctctctctattctgcccttggtggcactggcaaatttgttcttctctctaaagttggaccagaaagaaagaacttcctgcttttgatgtaataataccaatagatttctaatttctttccatttaattttttacaataatatattagcttctttctgcatacatgtgctttcaatggtattgagctattttatttcgttttgttttttatgattctaaaatttctcatttttaatcttctaggctttatccttcctaaatatccttggaattgttattcattttgttactatcatggcttttttcccaaaggtatagacttattaatttgcataattaaggttttttattgttcattttataatatttgtccaaatggtcatttgtgcactcaaaaaatagttaaagagaacctataatgtgccagaacagtagaatctcactgttaaggagcagttgaaaggattactggtaaaaatatatagggaaaaagggaagaatgttacaaggagaggtacgggcaaaatgtaaagttagaaattcagttaaagagttagaattctcatttgttctaaaatactcttctatttgaaaaaactgtacttcagtcatgccaatttaatagttgactgttacactcaaagatcaactgagaatcatacaccaaaactccaagaagaggtttagtgaaatttcaatacctctggggaagtttttcactcttccttatgggttagataccttaaagtgttgattcaccaatcaaactgtgcaggaaatcaatcaaacatgcaggaaaacatgtctagtactttctgagtaaccaaagattagccacacaaacaatccttttcccactattgcttcactctttgccaaaatgcattcaggtgaataaactacaaagggatcatttaattgaagaatgtgcaacacagcatttgctgttcccctgtgtcctatatcagttcccagtccattctacaagaaagggattttcatcagagggtttctttgttccttattagaactcatttcattaacaatggaaaatgaagaaaattatttagaacaagaagtcatcagcacaacaaagtagcacatggagcaactaaggaaaattttgcagcctcaaaagaggaacactcatgaaggagtaagcatgttccaaccatatgttttcatgtaatagtttacaaatgtatccaactacataaaaactaaaattagccattttggcaggaaaaatgaccccttttctgaacagtgaagagtttagcatatttattttttatataaaaggaggggtgattaataatgttacaagaggccataaaatatttttttccttgaatttctgccaagctaagatgtgtagcttaagtcaactaaagtctaattcaaattttgcaacctttttgatatatcgggtcaagtgacatttactaagacacatagagaaatactgcatcctgtgtattcttctgaaattgcttacagtatgttctaggattgcattccaaaatctctgaagtgaatgactagggagacagtaaaaaaggactgggccatattcactttttttccttggaattcatttattggttgaattttaaacctggaaggttgaaccaaatgagtcttagaacccaaggtcaccgagttgtagagctattatgaattaacttaaaacgttttcagaaaattgcaagcttgattagcttgctatggctaaatatttaaaacttaggtttgcaggcttccaggctttttctgatctcaactagacatcggcagtcgggaaaagtgctcgttttgtggtaccgtaactactgccattctcctagacaaaacttcagaatatcagtatgctctatttctcacaaatgaaattctcacactaccacctacagccccactccaacaaaattttccttttttcaccctgagcaatttgttcattcctagattgccaatatcagttaagtgttgatcatattctagaacatcaaagtaattaacaataaggtgtgaatgaggtttacaggttcacaaggcaaatttgcattttaaaagaggggcttgttaaacacaaatgaagttctaatagacagaatgtgtgaaagatattttttctccaagagattggagaagatttctaatgctctttttcagccctgagatattaaggatgttgggaatcctttcccctctttagtctcttgtcagccactcctctttttaccctaccacctttgcaagtagagtatatttaaaataaaggatcatcagtgagacaaagaattagttgatagaaccttgtgcatacctgaaaatcttgaggcctcaaactaggtactacagacttaattctcagaatagtcaatttaaacaaacaaaaatggcatgcataacaggattagccctttctacctggttaatttggagggaaaatttatgagaacattttctataattacttcaaagttttaaagaaatgtctgttaaacaatgaaaaacagtgagagtctttttttaaaaaataaaattatttgattacattcatataaataaaaaactaaagacaccctccatatactttttgatgtcaggtagactaagagaattaaatcagaacatcattttttttctagtcaaattaagatttcagaaaagaaataggaaaatatcagcaaaaagaaagaggaacatgtctatagagatctaggaatctcttttttaaaatttagctagtaaaaacaagtaaaataaaataaaatctacctagtaattagaaaatctttctgccttacaaactagtctttctactccagccacttttcgcctcgtttccccttccttccatggaaaaattatctatataagaaaccctattttatatctatataagaaaaattattcttatatctatataagaaaaattatctatataagtggtatatattatactactaacaaaactgttcacaatacttttgtactttaaatttcagccttttagtctttggccttggtgtacaagatctatagtctttcttttctagatctttgcaggccatcaatgtccatgtagagatgtcacccagaaatatcatggatctgtgtcaaaggtgattacagttaaggacccttgctacaacatgcttggccaaatttttctacagtctgtaaaagtgtcatagaagttgaaagggaaaaactatcattatttataaagagaaataatagtaactgttaataacttacagcttttcacagcatatgtagttctttcccttctggtttttaaaatgtttttaaacatattttagaaagggttaataataatgttcacagaaattatttaaatttgcacaccgagtaaatagtagaattagaattcaaacctaagcttcaaagaactttatttcagatattgtacttctttctccaccacaaatcttaagggcatacgtgcttgcttgtataaaataaggctaaaaaaaaatgacctaaaattagaaatcctaaataattcatagaaattttgttgtcatcttaaaataaactttttctgattaaagctctgagattaaattaataatgttttagtttatctctttctctttatagaagttggccaatagagtctactttaatttgtcctaaatagaatgattatcactgtaaatggtgttatgactaacttttttaaagcttatatacagggtaaccccatattttatcatccaaactaggacacttttgaaagtgaaaatgaacactactaataattgtgactgggccattggaactgaaactggaaactctcctgagtagactgagaggcatggttatccataattctgagtctgagaatgatgctgttttgaatgaaaaagtccagcagaatgaaaatccttgtatgttacctataacttgccttcattccacagttcccttgaatttggttcttaagcgctataagcattattgaatgattcagtctcacactccacccaagagatagcagaatgctggtgcattcattcaagacctaattagaaggaagagtgccacctgctgagaatcattcaccccgccctgtccctgtagtttttggatagcttggtagttgggagcttccatgcaaatttagactattcacagcccaaactgttggaccaaaagacatgatctatgcaatatcccccagtaaacctgagtcaaccttcatagaggtctaagtgataagtattaaaccaacatttgaaatgtcaaatgggaaaacccatttggcagttaaattatttttataactgaccaaaataatgttgtaaaatgaaagcctcaagttagtaattgataaaaaaaaattaaactactaaaaaatagatttttgtatatcaaagctaaatttgacagtattaggactgtaattaatcttagaatatctttataatgggcaaaaaaataaatattcttttgaaaacagataatatttatgagaacctattgctatgtgccatccatgtgtcttgctatcttccaattctgcctatgaaatgctccattgaaaggtgacccaaaagtgttacatgtgtaaacagactatcagaaaatgatagagacagagagggagagagatatgaactcgtattgctaactattgctaaattattgccaactattgctaaattatttggaaattcttcatataagattacttatcatccacctaacttaaaaagcattttcccagttattataaagttcaaattaatttgatttgttcctaaaaaaatgtcagtttgcttacaatttaaacttttatttaaggtagaaagtttcccttctgagcaacaagttacgggctggaagtggtaaaaaaaatctctaggagagaaaaaaaaaaaaactaatgaaattttgttgtggactagttcacaaagaaatacaagattccttacataatgcagccctttgtttgtggagcctctgacagaatcctgcagttttagctcaagctgaaagctgccaccaaagtcctccctaactccagacagctctgagtctttttccccacctcctgccataattactctggcttctgattaaatcacaccttatgtttaaggtcactaacctaaaatgacccaaagctactcatttctcttctcaacagttccccactacttacttgtaatatttggaagccttgaaaatagcttctgtcccaacttatgtagtcttttctccaaaagcaaatgcgataatagtttcctaagtcatgggttcaaacctcaggtgaaagattttagaaataatgagcatgctaaggagcctgtagcattggggtgaatcacagtcatacaacctaaaggacagagaaaaagtcttattgctggtggtatttgacaaacgctggttcctcacttaggtttcagtagaactgcatggtattgtcttcacatttaatagaagacttgtttatatcatctctcctttaaaacatttatcatttgggggcttattctactgtcttatttcttaaaatatgttgctattaattttggaaaatatttaaaaatttgcttttattgtatataataattgagctacattgtaacaaatttttgtcatataattttttattatagaatcaaattttccttttttgacctggtttcatcctcttttctgatactaatccaaattccccccttcctttctgtgtgagaatttcattacatataaaagtctagcatatttaatcaagatgtgaagcaaatgaatgtttatgaagtgccaagaatgtgaccaatgtctgttatctagttaggaagaacagtttggtgaattcaaattatgaatgttactattattactttggttagaaatgtgttcagcagcaggtagcaaatcctgacttaagtggcttaaacaaatagagattcagttttctcacctaacaggaagtccagaagttgagaggtaggaaattcctggtatatgataaagtctgtgctgacatctctgggattctttttgtctttctttcatgcttgtcactttatgatcacaaaatagctgccacaactccaagcatcatgtctatgttcaaagagggaaggaggaggaaacagaaggattgccttttaccttcctctttgtaacggaaaaaaaaagctttctcagaaacttgcctctcaagtggattgccacatagatcttattggctataactgaatccctaggccacccttctttgctagagaagcaagcaaattagagaatacacttgtcataattggcttataaatttcaaaactcatcatccagcactgagcacattgacactctgcacaaaatagaggtctgcggctaggaagaatgagggaatgaagtttggttagggaatagtgtccacttccactgtaatagtggggggaaaaggaaacagtgtgggctataaaaagtaaaaattaatttatggaagaagcagaacataagctggactataagataattaaaggaattcaatcaataaaataatgataggatactctaattatagaaagaataaaagcttaaaagcaggaacacatgttatatatttaagtggccactgtattgtgaattcctttattctttgaagataggaaataagtcttatttgtatcttattcctactgtctcacacatagaagatgtttattgaatcatagtaagtacatgaataatattctaatccagaagtctagacataatttaagaaatcatggagatgatagaacagaaaatttaaaattaggtctcctgtggaaataccaaaataaagggaaacactaacatagtctgcatacaccacagaacacttgttgggaagtactggaacctaggatgcctaagcaagatagagcaagtaatggaggctgaaatactaagttaataatttgaatttgatctgtgaaaccccaattatgtttctagaatcatgtttttttaatacacaaacaataatctttaacaagctatacagccatttaaggcataaagcctactgctgtctcttgctcactttttctccatgttcagttctctgtgatctccaggaaagctttggaaaaataaaaagtagtgtattggagatctctacttcataataatagtttacaattattcagtttttgttctactccagtcaagaggattccaatcaaaaggatcctaatcaaggggattattatatcattttaatgaattaatcactttcttgttatataatgaccttctctctgtctcttgtgacaatttttggctgaaagtctattttgtatgatataagaatagccactcttactagcttttggttatcgtttgcttggaatatatttttcccaccttttactttgagtctatgtttgtccctaaagctaaagtgtgttgttgttgttgttttttgttgttgttgttgttgctgttttaacagcatatggatagtcttcctcttaatctcttcagccagtttgtatcttttgattggggaagctaatccatttacacttaattattaataggtgagaacttattactgccatttttaaattattgtctggttgttttgtagttcctttgtccctctgttgctgtctttttttgtgatttgattatcttttgtagcaatatgctttgattcctttctctttatgttttatatatctactacaggtgtttttcttgtatttaccatgaggcttccataaaacaacttataatcatctattttaagctgatagcaacttaaatttgatcacatacaaaatctctactcttttacttctcctatatacacacttcatgttattggtgtcacaatttacgtctttttatactgtgtatccattaacaaatcatgtcattacttttatagttttgtcttttaatgtttataccagagttgaaagtgatttacacactatcattagagtactagaggtctctagtatttgactatatacttgactttattggcaagttttatactttcatcttttcatgctgctaatcaacatcctttcatttcagcttaaagaactttctgtagcatttcatgcaaagcaggtacagtgatggtgaacacccctctgcatgtttgtctaggaaagtctttacctcttctttattattgaaggatggcttttctgagtatagcgttcttggttgacaggttgttgttgttttttgatcttcagtactttgaatatgtcatcttactctctctttgcctgtgaggattctgctgagaaatttgctgacagtcttatggggactcctttgaatgtgatgagttgcttcgctcttgtttctctcaaaattctgtctttgacttttgacaattggattataatgggtcttggtgtagatctttggagctctttggacttcatgaatctggatgttgatttctctcccctgatttgggaagttccttaccattatttctttaaataggctttctacccctttccctctcttctccccagaattccctaatgtgtttattgattcacttgtttgagtcccataagtcacttaggctttcctcacttttcatccttgttttttctttgtgctcctgactacataatttcaaatgatctgtctttatgttcactgtttctttcttctgcttgattaggtctgcttttgaactcctctagtgaatctttcagttcaatttttgtattctccagcttcagtaattctattgggttctttttaatagtctctatctctttatttaacttctcattttgttcttgtatctttttcctaattttatttagctatctctcagtgttctcttgtaactcactgggcttctttaagacatttattttgcattctttgtcagttaattcagggatctctgtttctttcaggatggttattggagatgactctttgtgttccttgtagattttctttgtgatctgtatatttgaagtagcagctacctttcccagtctctacagatgagttttgatgagtagagacctttaccagttcatggtgcttaatatgagacaagatagagacatacaccttggggagcacaatctaagactgggggcaaggccctttacacttctttccttgccttctcaaggaaaaggctcggttctatgtttttttcttattatacagagcagtgccagctgcaaagggatgcctgctccttttattttttgctaactatccctcagaaccaagttctaatggtcgcacaaggctcagtacaaggtgaaatggaaactggcttcacagagggaactctgaaatgctgagaataaggcccccttcattccctttcctccctcatctaagaataacctcagttctgccccattcctaatcttgcaaggcagctctaactgtaaggagttgccctcctcatttctttgctcctacgcatccctgggaacgaagttctacaggtgcgtcagtacacagtatgaggcaatataggaactgacccaacagagggttctctgagaggccagaggccaggaagccagatacacactccaatctcactttctgtggcacaggagaaatcatgagctgaagcagtcctctcagtgttgagctaagccagtctgggggaagtactgatatgacattctaacatgaaattgcactttttacccatgcaaatgcaactgcttttagtttgggatcctctagggtgcctctatttcttagctacaatctgaatatatttgcaaggtattttggttccaacattgttttatcagtatttctgtggaagaatgagaggtagagttttccactctgccatcttgctgacttcacccctattatttgttaagacattaattttacttgaaaaaaatatgccatttggactggctgatagacaaagtattaagatatgcacccctcagtaacttggcatttctaacatgcctatgggtctatagctatttaattatgtttacttgttactttaggcttcagccttcttgattaggttaggatacatcggattatttgagctgaatagtgcttcttattttgacagaagaatgtctattttgttttaattcagtgatatattttcagtggcagatctttaaaataactcttctaaaacttgtaatatttttagtattggacttagttaagttacttatctgggcctcagttgtatcatctgcaaaatgaggcaacaggatttaacatggtctctagttaattcgagctctaaaattgtgcgatctcatttgtcatttcaattcaacatatgttaacgaatggaatacttacataatgtaaatcaatgaggtagaacttgggtggatacagagatgaatgtgattccttcatgcaaatagcttataatttgatgccttcaaaactgagatgtgtattccccaacacatcctagttccttatgtttgacatgtcatttataaataagggtatattatttatttttgaagtggaagaaatttattcctttgttactatttttcatctctagatttggagaaacaaaaatgtggcctaaactatcattttaataatattgtgcatttgtatttcctcttcattgcaaagcatttacaagattctggaatcattttcttatccatccctaaagtagcccagtgcaagtagaaaaggacagttattccccttttagtgattagaaaactggaccctgatttttctggagttatataatatgccactgaatgagaacaggtaaaaatccaggaactctcatttcaagactgcccagccaggttcctttgtatgttacagtttcttttagtaagttctgcagagcctgattcctaaatcatctttcaaaccaaattctttcttattccctatccaaacagcagcatagccattgatgatttcagatagatcaacaggaaaaaaaaattgtagtgaaagaatagaatgtatgcagcaagaaatgtgctgtgcaagctgtgatacagtgtacaatgtttcagtctttagctggaattaaaattagaagttgaaaaaacttggggactcctccatcaatctaatctagaaacatttgactgtaggcccagcagcccacaatgaaacctgcccttttgctaggtgagaacatcattctgaacatgccaccttggaaactttgcatcagttcttggtatcactagaattttcctatcctgcttttgagaagagtcagtgtgagaacaaatatacttctttttacaaatcttgaaagtagatccttagaaataggtgattacatttccttcataacctaattctttctatgtagtaaaaaagtcatattcatgtttggtctcatagtttccttagtcaaaaaatttgcatctaaaagcctaggaaaatgtttggcctgcacagttgaatgtttaaacaggtgcgcactgcactggtctggctgaagaaaggtagtctcctccacttggaaaccctgacattaagagaatgattcttgtgccagctttcaggaaagcttgtgaaggaaaagttcaggtgattcttaagtcttattacctgattatcagcccatgtgcctcccttccattctgtattctcatgaagaaattgatttaatagattgaagatattattaaatacattctgcattaatattatatgtcctctttgaatccaagtggcaatacaatagaatttcattttataaataacacctttcaagcgaacaccacagggcacagtacaaaagaatcaaaatagaacacaaatgctgtaatcaaatgcagaccccaggaaggctgattaaaaaggcatgttgctactaagaacagccgacaggttaagtatagtgggtcatagcagaaaagccagcagaacagaagggcaaactaaaataaaatggacttgcctgcctgaatcacacggacttatgacattcctttgtcttcatctctttttgaactcaggaattgcaggggagaggggggtgtgcatgtgtgttggaggagagaactaaacatagggtcattaaatttatcctcagtactcacgcatagcacaaacaaaaggaaatcataaggataaccacctgcagctggcagagatgcctacagtgtgattgtgagacaacccaacatggcttgctttgctggataccactggctttaagaaaacacaactgtgaggtaacaagtagaccccttccataatagtgagaacagatagtgctgatggccagacataggtaaaaacggatgaatggtgagaaagatgttctgtggtcctgacctcagtatagtctactctctacaggactctcctcacccaattagcttttctgctctcagcctctcacaaccacgctccttgctaatgtcaggtgtttgtggttttaaactctacctgtaattatacagcaaaagcacctgttcccttcttaagggaattaggcaaaagtaggggaggtattttggaatatactctctccccatatgtaaaactagttctaacaatgatcacagtatcatagtttaccaaattggtcatttattgatgcttctctatttaatattaagagtagaacaatataggaccagaatcataagaaaaaatttctaaatatgtatttttctgaaaaacagtaacctatattttgctgggcacgtggctcatgcctgtaatcccagcactttgggaggccgaggcaggcggatcacgaggtcaggagttcaagaccagcctgaccaatatggtgaaaccctgtctctactaaaaatacaaaaattagctgggtgtggtggcacatgtctgtaatcccagctactcaagaggctgaggcaggagaattgcttgaacccggaaggcagaggttgcagtgagccaagattgcaccactgcactccagcctgggcaacagagcaagacgccatctcaaaaaaaaaaaaaaaaaaaaaaaaaaaaaagaataacctatttaagagccaccccacccctccacaaaaatgtcatagaagaagcaaatatgagttctagagttaattaaaaagaaaaggaaagagaaaggaaaaatgataatcgaggcaatttttacctctctcaaagcttttggttgtttgtaatgactcttctgaatacccacttagttgagattctggtgtgagatcactgatgcatacatttaggtcaatagcttagtacttctgtatatttttttcttaagtaaattataaacatgtaattaaaatgtatgtgggcagcacttgggggaaaaggttatgtacatatactagtactgtcactttaaaatattctattataggtatttatctactggcctcttatttttcttaattctgacagtatttgcttaactatgcaaagggagttggtttattagtaaatgtgaacagtagtgcaatcagttgaaaatactggattataatctctaatgtgagttatttcatgaagtgtgtgagcaaataataatatctgtgccagttaccaatgtattacctcccattgcctccttccaaatgtagttctccttgcctgctctgcaaaaatgtatctggattctttaaatattttttctttgctagctggtttgagggtgctttgtcagtagagaaggtagggagacgttgcagaaagaagaaattttccttcctggttgtcatgcactactttggcagcctcctgcaatgtgcacggtttctccagagcctggcttctacaacataagcaacctttacagcatgtagctcctgcagcaaatgcagctaacctggtacccagcagctgaagcacaggtagcttctccagtacgtggcaggtagcagctacccctagcacccaccatacacacacacgtacacacacatgtgtacacacacattgggcaatttatagcagagtgcctcagatgagatacatccctgtaaatagctttcattagcaccctagagtgcaggtgctactgatgcagctccccagcaacttctctgccatccaatgagttatggctgtgtgttgtccaacaaggtctggatcctggtccaggggtccaggagatttttgtcttgagtcctacaatgtctagatctcagtccagggatggaggagactcttccttggatatgctatcttagccctgcaaataatggctgttccttacatttgttattcttctattcttttttattttttaagacaaggtctcgctttgtcacccagggttgaatgcagtggcatgaacacagctcactgcagcctcaacctcctggaatcaagcgatcctctcacctcagccccacaagtagctgggactgcaggcacacaccatcatgctcgactaatattttgtagaaacggcatttcaccattttgcccaaactagtcttcagctcctaggctgaagacccacctcggccctaagtgctgggattacaggcatgagcccctgcgcctggcccatgttattcttatattctttaaagtattctttacttcttactagctactcttattactttaatcccgttattattaataatttaaactaactttctattcaaattgctatatggtctctgtatccaaacagggcctgactgacacatacccaaagaatattaaaataatctatattctttgggagtaggagaagataaatatgataagtcatctttttatagaacagattagtattggtacaatgtgccttatctagggctggctattagatggacaaaaacttttgagaatttgctgctgcactgaaaagtgctacaataataataatatggtgctatatattagtctaactgtacatacagtttaaatatcaaatttttaaatattttacatgattttactgagactttttaaaaatgtaagctatagtgaagcaaacaacaaaggctgtactaaaaaataatttgttgaccctgaaaagatgttgcaaaataataattctataatgtgaatttgtagattattaatgctaggataatgatagccatcatttattgagaactgagaaaatcctcagcactttatattaatttattggatcctcatattaattaatagaagtggatattattatcatccctattttacaaatgggaaaagaaagacttggcaaggttaaggaactggcctgaggtgatatatataataaatttcagagccaaaatttgaatctagatctgcctatgagccctgaatcttaaccactgcccactgcttccagaatactgacactgaagcaaatggcaagtcatttgtgaaaacaaacccaggatacttgtttttgttggttttcatcaaagatccagaaaaagaaactctgaagtatccctagaatgtatagcacaccctgagatatttctgagatagctaacctattactttttttttaacaaaatatggacaaactggatgaacatagtgatcaaatccccagaaccaaagtgttaacagtctatcaaaacctagcagcctttattcagagctgaattgaaggcagatgaaatattaacagcagctctagcagcataaaatgaaatatgagatcctgtatcagaaattattagtaacctgttaaaagaaatgctgaaaaatggcagttaccaaattaaaactgggaaacagagcccaaatgggaaatttcaaaaagtttggaggaaaataaatgacagatcgtcctcttggctcttattagtatgccatcctaaatcctgcttggcaatgggtggtggaggtgaaataagaactgcattgctgccagtgctggtcctcagatttgtagtcctaagtgtctgtgatggtgtctgggattgattggaaaagtagttagaagttggtagcattttagctttatctaagttaaagagtgtggagactcttattatgaaaggctttctctcatttgtgaattggcccctttgctccacttttggatggctggcttcctccatgccctgctacactaaatattctacatgggaaagctattttccttaaacgccttcaaatttaaagcatctatttggatatgttggtgtttatgactcaaaatatctagcatcaaataaaaaaagagagagattacaaatacaaaataccaactagtaaatgaaggacatatttttccattagtaactgagagcatagagattactatgagcggagttgttgagcagttgatgccaaagggagaaaaaaaaggaaatgagctatagaaccatagaatcttagtgttggcagagactatggagtttatgcagtcctaccctatcatttttcaatgaagagactgagacatggggagttaagggacttgacttgcccaagacacatagttgtttactgacagtcaggccaaaaacatttcccaactcccagcccggaactctacagttcagcatgctactgccgtcctctactgaaaattaacactaactcagcctggaacatagaagaattcagcatctgtggggagtgaaagaaaagatgaatttagagctggaaatcaatctgggaaaagaaaagaggaaacggatgatttgtcattgtgacttgttggtcaaggttgtataagatattttgtgtcagttactcccctgtgcattcctacaaaatacaatggaattattttgttataattccccagggtttatatttatatgtacaggttttatttgcttggtgaattctccatgtacaagtcatctccaggtgtagattggtttgtggatggcattgctattgaaccttgtcatttacatgggtctgactttccttctctaacagtaaagtatgctccaggggaatcttcttcatgggatactcctaactgagggtcagaagtaggcttaagatgtaagaattatcgtctattaacccttgtattctgataatctcatggaaaacttgggccatatgtgggacttttaatcaggctaatgaattaggtaaaataattttctttatttggaagcgcagagtaatttgaagtaaaccagtagcaaataagatacaataaacatgtcccaataggatcccctgtgaaatggcattctagcagtatagatctcctagtttagtcaaatatttttcagaacagagcaaccagaaatgagagaatcagataatatgatgaaaactacagatggaatgctttgcatgaaaagtgattatatacaagagagggcttaggagtgggtaggagtagagttggaaaagagtgggtaactgaaataagagaagataatgcttgaccaggtctagtaaaatattccctgccacaaccactattccatgaagagattgagccaagaggcctgaataaactaaccttaagttcagagttgccattattgtgggaggcatcagggagagcacatccggaattgtgttacacagtaatcactgctgggtgtcagcattcatcagccagatggtcagacccacaattaatcaattaggctgcgatgatcaactggactacgttttcccctttggtaaaaagccctcatcatgcggttaaggccaataacacttttatcctgttgcttttggagaagcttctaaaaattcctcttttcttttttgggcctctagttactggacaactgttaggctccaagttgctttgacaacatagatacccaaattcaaggatttcacataatagattttcaacatcctgtgtcttcaagtataatgtttaacatacccagacagaaataatctttttaaagcagcagtgtaagcagtgttactcaactgattttactagagtcttcatattgattcctctcaatccagtggaacaacactggagggggattctttcactggatacttataaagatgatatgatatgataatcaaataatatgaataataagcaatttactgaatgttcaccatgtgacaggtactgctgagataagggttaatgaacattgattcagtgcttacaatgattccatgaggatgataatattatttccatttcaaagagagagaaactgaggctagaaagctcatttgcccaagattaaacagttagtaaatatgtgttcagatgacttaataccctctgaaatgaaagctgaaagtttattttacatttccttacccatatacatctgtgcatctctgagggacaacatttaggaatatgtggtgggtcctcattactcctcttaaaaggactttaaagaaatattttactcgtgttcccgaagtctgttgctctccttctgttttccatgctgttttattctacatcatgtgacttgagattgctttcttccttctttatggccattactaccatttcctgatagttatcagtctccacctggcatcttcatctagatatggtttctctaagtctgttcagataccaagacttttttttatcagttgacttatagagcaatttgcctcctctgaaacaaaatgtctatcactaattttttttatgttgaaccttgtttttctatctattttattttccctctccccttgctatattacagtactactgcagagggagaagtgtttgaagtcctgttagtgggagcatcacttcttgatggaggtctaatggaggtctatgttggccccattgagtagaaatatggtcacagtgtcatagttcccctatgttttatcattaactggtaactctcttttctctaagctcttctctacccccacccaagctcaacttaaagagtactcctctttaaccatttcatacaggctatatacagacactattaacccaaatgtacacctttgagatatcagactcatattattttatgaaatatgaggcttttcttgctatttaactgcagtgccttgcattttatttgttttgctacttactgaattgggaaaacagtaccaaaatactaggatagtatataggaagtcaccatttcttaattcaagtttgggagcatgtggaagaaaagacatttcagaaaccttaatgagcatcttttatcctccagggctctaccagtgccctctttttctgactgtggtactctgttttgtccttgctatgtttggtaggcagcttttttttttctcttgatgcttctttttttacagtcctacaatcttcaccccagagctgatgaggcgctttcattttgacctgcagtatttctgtgtattgcagaacagagccctgccatctagactgcctttctgcttcattttgctcctgacctaaacccccctgctattccaggcctggcctctcatgaccagagactgctgactcatcctggcctgtgccaagctgtgcagtcgcttagtgatgtggacaggagtcgaaggactagaatgagatcactgaactcatttcacttgttgcttacggtacagtccagcatgagctggaaatgtaggaacctcagcctcccgagcagaaagagtaagtagataaaacacaccgcatcaccaagtcctcaacaagcagtagtcgggtggtgggtgggggctcgctctatcatggccgtggctagggcattctggttcatcaggagttttcctttgtcctctcttcttcctcttctccacagtcgtacccttccccccttccctgaacttcccttctgaaaatgtctggatggtacagcagtgatctgggcagaaatgaaatttggctaataagcagcctctgcacaaaattctggaacagtgacactgttgaaattgcttagtttagtttgtctactgggaactcacatgaacttcccaacagaattcaaggggatgaaatcttttttgttctgttttgttctcctttcctttttgattctctttttctttctgttttgagggaggtagtttcaggagacatggctgcattctggtgtggtgtaaagttttccgtcgggagacaataatgtacattcctctggcaggacgggatgggttttttttttttttgtttctcttactgttgtttatttataagacatttcctcccagttagtggaagttagatcgtaagaggctccagtgattttccttccacctcccctccctaatttctgtgcttcagcactctggaacactgtgaactcgacaaactaatcagagcagggagcttaacagccaggcctggacaccctcaagagactgtgtgctgattctcagtcgtcactccttggatcaggaaccatagtcctggtgagtggtgaggttccagaatttgatgtgtcaaggattttattcttggtgtctctaaggcaagcaggaaataaagggtgtttttaaaacaaacaaacaaaaaatacaattaaagaaatactaccaaacagtcaaatggaatgatgaagatttttagcgggcacaacttagagcactctacggacaatggcagagccttgaggctatgctcaggagcagcctgtaggcataggtttcatactgccaccgatggatgtcagccttgacatgcctagcaaacatgcttgttggggggaggaagataggtgagtgggggcagggaggtagtattcagggaggtagatgggggaagtgaaagtggaattaattgttcatttggagtttcactccaccagctttccatgcatttctgttctgagtatttacattatgctcacagtacttacatgcctagctaagcaggagagaatatctatagtggatgtagagcaaacattcttgctaatactgttctaaagatcactttgctaacaactggttgcttttaaacgttagggaacctccccacacccgacctttggaaaatatgatttgtcacaccctcttctttattcttctgcattcatagtatcaagcagaagaatgcaatgagaatccttatttggttcccaggaaatttatcatcctgccacaggaaaactaaatgactgtcctcacagtattaaacccaaatatagtattgtcctcaatttaagggacactgattgaatgtgctctgggaagttgtcgaaggaatggagtggggatggttgcatcctgtctgatgtgagactggcagaggagtccacggaccagctttcatagccaaaatgtgccttccacatccttcttaataactcatactctccctaaaagtagaattcctgttggaatgtgtttttatcctttaccatcaggtccctgcctagtttcttttctagaggtattccatcttactgggttttctcatcttctttctatttcaagaatctggcatgttcattaagcatggaaaaaacaaaagacgaaacaaaaaccaaaaaaacatggtggccataaaagcattcgattgtgtggcagcatctgaagtgaattgctttttggaaagagggggagtctttgatgtcgccaatatggttctcataggctgaaacttccaggaatcacaacccagcctaaggggcacttacttgatgttcttaaattttaggaaagagatgttattttattgttttggttgtccttgctgttaacacattgccagtagatttctcctagaagtttaaaatgctttagcaatggatgattttacatttaaccagatgtatattgtatgtgcctgttgcatgtactcttgtccaagtaggtacagcgatccagcgtattacattggtactcagctttggaattttgtttgctatactgagtgcttcagattcttaaccacagaactcatacatgctcatatagcccaagtttcctatagagactgacccctgctacagccttatcaggtttgtcagtggcctctaggacagagtcagcttcctatcacaattcctatagtttgtgaggcacattaaattcatcagctgtcattgtgatagaaaatagtctcagagttttattagggctagtatggtaaaagtttaatgttatattaatagtaaagtttgcctattgtagttagctcgtgttaggactatactatttatatgtataatatttcttgggtaattttcattagttatcttgttttctaaagaaaaaaagttgaaagggaaatggtgtttacaatacgttataaaaaatgtaactagctcttaggccattaccaccaagacctacataggaggttaacattcctcagttaatattcaaactgcccagactcccaggaaaactgtctcatagtttctggtagggatgtctattagaactgcgttgaaggcaagctagatctctaacactttgaaaacatgttattaatgactacatatgaaattatataagcaactttaagaagagaataggtgaaaacaaatatttaagagtattcccaagacatgacatttaaaaaaatataatctgccagagagatttttcttatagttgctaaggcttggagttccaagtggtcgtggaagaatttcatgactaaattgaaatatataagaagtcagaatttgattagtgtacctctgatacaaaggcaagacgatgtattttttgtgcttcaatggctatattaatattacttattttttcaataccttgatcataagccttcacaatgcactgtcaataactcaatttcctagtgctcacctggaaattctaatttcattaaattaatgaggatgcatgttgtgaaatgtgtattttcttgcgtgcatattttagctgtaagtacttcctatatgctatattcatttaattaggcagtcgcaaatatacacaaatcaaattgctaaataacagaattgttgttaccccaataagaaattgttctttcttatttatatagaagtggtttttagtatttatgtgattcccctaagaaagacatatattttaaaaacttaaaaaggagttgattgcttgtatcatatgattgtatatgtatgttagcttataaatgcctacatatacgcacaaccatatatctatattcagctattaaaaatatgaccaaattctagccaggcttacttgcctttgatttcagtcaaatgttttggtcataatgaccataaatgaaatgtagctgactttttatcacactgacaacaccgaaagtttacacaaatatttatgaacagtatttgcaaaaagaaagatgtagttagctgataagtttggtaattatccttcagcaaatatacatattagcttatcaacctaaattctattatgtacagcttcaaaatattaattgctatatatataaaagtttaaaattaaatagaaagaaattaattgatatcttaaaattgagcatatgtttaatgaattcattttattttataaggctgagtacatatacagatgatcccattttagtttctcagctattttactatatgttaaatattttgatgctgtatttacatattagcatcagcaaccataatttttctgataacttttcaagatcagccaaatcatatccttgacaagtcacactttttctctgaagttttccataaaacccaaattaaaagtgatctgacactggtagcattttacaaatctaccttcatttagcatttatatatgcttttaagttgaagttttttctatatatgaaactgcaagtggttagagggcaggttttgtgttttaggtttgttaatttctctcccaaccagtgtcagattggctcagtctgagtggaggatcaatgaataggtgatgaatgaatggatatctacatgtcagtgcattgacagtgaatacatcttgcttatcatagtgaaagaaacagccggacacagtggctcatgcctgtaatcccagcactttgggaggccgaggcgggcggatcacctgaggtcaggagttcgagaccagcctgataaacatgaagaaaccccctctctactaaaaatacaacattagccgggcatggtggcgcatgcgtgtaatcctagctgctcgggaggctgaggcaggagaatcgctagaacctaggaggtggagattgcagtgagccaaagtcgtgccattgcactccagcctgtgcaacaagagcaaaactccatctcaaaaaaaaagaaaagaaaagaaaaaaacatgtccatgtctagaacacaaattggcagagtcttctatatctgagcctccttaactcccacattagatcttccaactatctgacagcatttccaaccatttactaagattgctaaggttccccacaatgcttgggtaatttctgatggaacatgggatcttcagtttgcagtagttccattcattttcctggacttatgagggtgaccgaatatccagcttggtcagctcatgtagtcagaaagtaccagacttacctataatgcatcatattaaccaacagtccctccagcttgtcaatacttgttcttcctttcctcaaacttccacatccgtggaggtcaggctgatgtcagttatggaaaggcatgaagactggctatggatgccctgtgaactagacaggagagaggcggggcagacatacagcacaataaagagcaggggcaagaagactggcagccaaatcatttgcactgtcttaacaagcactaattaaatgccctgtttgaggtaaataatagctgaaaatagcctactgcagttgtttctcatcaatgagtagagaaataggtggaatcacttagtgctgtttcattcattaagctgcagcacactaagccttcttcagaggagaggggcaccaagtcgagctagcctctaaagtaccatttgctaaatgcccattctagcaccctagatggtattgtgctgacaagaatcacatccagagagtaactgcatgtactacaaactgaccctaataaacaatttaaaaaaaaaacccaaaatattgtgtataataaaacatgctttaatcttacccattttcaattgtcaatcaacttagcaatccccaaactatatctcattctgtcccctaaaccaatttttttcctggagtttatatatatagaatattccttttcgtctctttattttccctgctcactctctagtaaactgaattcctagatgtaagcagccacagaaagaaaagtgattcacataatggataattaacccttgaacaatggaaagttaactctccatagaaatgccaaaaactgaaatgttttgttattgaatttattctcctttgggagttaacactaatggagaacatctccattagtacaaacctggcaccaaacaacctgttcatccttaagctatgaatgctgcactcaccttccagttcattctggcaggatttgtaacacaatgtcctcctgggtagtcatgtacaaaccactccgaagggcaaaattatatgagtgcctaatccacttgtgaaaattaaagaaaggggatcttttttatgaaaaacacctaatatggaaagacataaattgtaataaaaagtgttagcaccttgcacctcctgctaattgcattcctagtcaagaggaagcaaaattgtataacaaatgtcagaggtacatcatgaacaaagtgcaaagaattgtctgttcctttcaatagtgaattgaaaaagagtagcaaacctgtttaagctatgtatagtagctttaattttggctcctaacctttctgggactcatctatttcatttgtctaatgaggataatagtaacccattcaacttactgtacacagactgtactgtacacagactgtttcttcattatattcattaaagatggatttaacattaattcattcattcacccatgtattttttagtttaagaaatatttttgggccagatgcagtggctcacacctataatcccagcagtttgaaaggccaaggcaggaggatcccttgagcccaggagtttgagaccagtctgggtaacatagcaagatctcatctctactaaaatttttaaaaagtagccaggcatgatggcacatgcctgtagtcccagctaccgaggaggctgagatgggaggatcccttatcccttgagcccaggagtttgagcttgcattgagctatgattgcaccactatactccaacctgggcaacagagcaagactgtgtctcaaaaaacaaaccaaaaaaaaaaaaaaaaaggaaagaaacatttttgaatccctactctgtgtcagttattattcaagaagctaaagattgattcatttattaataaatatttattgaggaattcatattatgtacccaacactattccaggggttggggatactgcagtagatttagaaaaaaaaaaacagaaatctttgttctccttgtagttactttctagataggagagacagaagataaaatatatatatatatgtaaaatatgtggcattttatgataagtgctatggagaaaatttaaagaggagaaagagtgtatacatgtgtgtttgtgtcagggataagtttgcaattttaaatagggtggagaggtagagagggaagtcttcattgggggacagcatttgagaaaagacctcaatgaaagtgaagaagcaagttttgtggatatctaagcaaaagcattttcaacagtggaaccatcaagtgcaaaggccttggacatgaatgtatctggaaagtttgagtgacaacaaggaagtctgtgtggcagaatctgagtgggtaagcatgagactagtaggagatgaagtaagggagacaagggtgtctgatcacatgggccctaatatgctgttgtgaaggcattggctttgtcatttacaatacaaagatgaatacaacatggtctcaagttgctcactagaggagaggcagatagggaaacaagttggggtaataccattatgctaagtgccgtaactgaaggatgttcaaggaaccatggaggcacagtgagtgttcagctgaacatatcttggagtgggggatcagaggaagtttcacagaagagctgataaatccgtgctgggaatggaaggattttcccagatggtcagagggaggaagaacattcagtaagggagccagcaggggcaaaggcagttaactagaaatagcatggcagagctggggaacactatcacttatgtgtagtaggggagtacagagaaacgatgctgtagatgcaggcagggaacaatcatgttggaccctgattgccatgcaaagaagttttaacttcatcttgtggcattcagggagctattgaaaggttttaagtagagaaggttaatgatgaaattgtgtgatacaagatcaccctgtcagcagggtagaggatagattataggagtgggagaatagaggcaagaaaatgagttaggaggcaactgaaattgttcagacaggaaacaatgaagccctgaactaggacaataactgtgggaatagacagagaggaggagatatgttcaagagataggcaaaattgacacaatttaataacctttgggctgggcatggagagaaggaattttggattgctcccaggtttctgccttatacaactaagcaagaaaagctatgaggaggaagagtagattttggaggatgggggaagattacaaatttacttttgaaggtgtttaatttgggggtgttaggggagcatccagactggcagttggatttagtcaggaatgctggagatgtcagggacagactttggcagtcatctgaatcatccaaatcatggtaatagttaaaattatggagtggacatttctcaggaaaaatatattgaaagatgacaaaagggagaaggtcctttatatacagtgcatttctggaatggagagaggaagaggagcctgcagagattatcatgagcaactattatgtgccagtcattgtgctagatagtgggagaaccaagatgactggcacccagatcctgctgcagaagtgtccatagcttgtccaaatataagaggttcttattaccatcatcaccaaccaaaggataatgctaacagagggaatgcccaaacttaactaggaaaatcgtgcaaaatatttaatcggcatcaagggagatgattataaaggcaaaatcctggagagtttgctgcattcatttttgctatacacctcatttctgatctttctaaagcttgtatgtgtatgttccagtgttagcatgggttcaagctattggcaaaacaagccaggtgtaaattatggtaggattgaaatcgatagtgctttgaagtactggagtgcccagttcacatcagggcatgcgtctgtgttcactgaaacatggctatcaagtgcacctcgagtcattagatgtgttatccagtgaataacagcataatgatattttagcagagcagccttatgataaattctgctttagtgaaactccatatacagaacaatttctcctggccgtgtacattgcatggcaaagaaaggatatcctgctgcgtatcagaaggctgtaatttcatttaggggttctattgacatcgtaaactgcaagagcagagctcaagtggctatttaagtcataggaacttcaagctaaaattactgcctagtcctaatcgccacctccaggggactcctgcctatacatatgtgctttatgtttctatctttgtgtctataaatactcaatcactccagaggctgaggcgataagctgttctaaaatatgacaggtatctgtcacgtttgcagctgatacaggcttaagggctaaacgcagttatattattcattgacgatcaaatgataaaaggggccagaactccccaacaaagttcagagtacaggagttcttgtttctttgctttaagacattctctactcagtttaaagtcaggatcttccagcatgttgaggctagaaaaaaggaacttttacatttacctgtgcagcaaggttaacagcctatacatccttaccccaacttgcccttctttgccttgacccatgctcacttgtgaaaataatagtactgtagtcttggtatttagtaaggcattatatagtgtcccctaaaagtgattccctagatatctaacagggacattctattttgatatttactcaaactgaaaataggaaaccatcatattggagttgaatgcttatactctaaggaaaatacatttatataaatttgcaaattgtcaaatagtatttattaagtgatactttaaaattgactccaggaaaccaataggaaagattcaaagttaagtatgtttctccttagtttgtaattaaattttcatgttcatgctcccacatgaacaatcaactttgtcaaaagtgggcactacaggctgggcgcggtggctcatgcctgtaatcccaagcactttgggcactttgggaggcgaggcaggcagatcacctgaggtcaggagttcaagaccagcctagccaacatgatgaaacctcgtctctactaaaaatacaaaaattagctggatgtggtggcacacacctataatcccagctactcgggaggctaaggcaggagaatcgcttgaaactgggagggaggtggaggttgcagtgagctgagatcacaccactgcacactccagcctgggcgaccgagcaagactccgtctcaaaacaaacaaacaaacaaacaaacaaacaaaaaaagtggccactatgagattggacactacaatctaactttcttcagtcattatgctacttatgttttatttgtttgctcttttctgggcttgggattaatctgtctacatgctgtttaataccagatcccagcagaattatcatggttcagaaaatcccagcagaattatcagggtttgaaaaatctcagtaataatgggatttttcattcttcataaggtaactgcattttacagtcatcctattaacccttatgtcaccccgttgaggaaaggaagcttgaagagatagacagccacacttaccaggctgagactaaactttttactttccatattaccttttccattgttccagtgctcctcacaatactcaatttttcccttaaatagtacaattaaaaattaaaatctgtaagagccaaatctctgatatatgttaccccaatactctcattttatgtctaaacaatataatataccattgtgataatttttagaatggctactgctctggtaagaatatccttaaatcatttctcatatatatttctcaatatattctgtagacatctataagctccaagatgaggcagggcaactcttttgttggttacctgaatttaggcagtagagcagtgtggttaagagtgaagactacgtagattctacaacactgtaaccttaagaaaactaattctcatgactcagtttctttatctgtaaattaaggatgaggagaaggaggtgggggaccataaatttgtttttattataaaattactgtggggagtaagtaatctaataaatgtaaaatatttaaaccaatacctagtatataataagcactcaataaacagctgctgttatcatcattaccattatcatcctcctcatcatcactcactcttatgctataggatcatggttaatacttgttaggaaaaaaacctacatgcacagacaccatcatatgtgaacacactcccccgacctaggaatccttgcttgtcctagctgtgtaagctttacatacagattgatcttaatattatcccaagcagagaacatataaggaatccatgctttggatgaagtgagcttggtactgagtttacttttaccactggtttcaagtagctgatatatgatcacttctttggtgggcctcactcctattacctactcattgtctctggctgctctcatcttattacttaagtctttcatgtctattttccctccaaactgtaaattctgttaagcatggtctagtctaggtctgttgatccactggtttaggtctatagatcagtctactactattattcaataaaaaaatgtaaggtcaaataatgaatgaaggagtttccttctatttccagcttcttggttaggtcctagtcctggccacctgatgtgctaaatgctgacctcattgtacacctaggccatcctattcactatccccagttatcattcccagtcttccagtccaaactcttttaattatttttgtcttcttgcctaatacaaaacccttaataccagtacctagtccatacagtaggcccaccctcctatctgcttcatcttttccttcatggaactgtgaacaccacactagaaccatgtttgtatgcctttgccaatgctttctttccatttggaattagagctttaatcttacaggtgattcattattcatctgcattttaatctgatgcccttggctctaatcttgattctgatcttcatattatgttattcacaaacccttttctatatttattatattttaagaaaatacacatatatcaataacaaatgagtaaaagctgatatcaagttctatctacaaaaatcagcattaaaaatattcggcatactatatggtgtaccatttgttttgcctttcattatgcttcttatcttagctgcttgatgaatatcagagatcttataccctgaacttggtctcagtggccctaaacctaccctatccctaggctagtgctgacaacatccaaagcttaattaatgtcaatttttactggaaaatgttggcattagtgtagtagtatgtctaatagtgaatatcacgtaaaaaagaaaggagctaatagcaaaatgcagcattattgtcactggaaaagaccactgaccattacatgtggatatatatttattgtgttcctgttattgtcatcctcttttggacttttttttaataaaacgatggagaaaattttgttagaagtggtacaatttaaatttagaaataagtatgatgctaaacttaattcacagttatcacaacagttaataatgttactatcagaaacacaatacctgctcacagagagcttatggtttttatactcttattgcagagactagtaattagatcctaaaactaactggaaattaccaatctgccattatgcaccaacatgagcaataacgaaaggtagtgagtactacaagaatctgcattatggtggcctagaaaggagtatagaaggcttgattaatagtagacggagaactttagctgtagatgtaaaagctggacgttgaaagataatggaataaaaggtcttttggaaagaagcaaagatggtagccaatggtttaatatgggaaaacagagaagtagggaggatgaagaaaaatatcaaccaatggaaataaagttggtgtatacaggaagtagtgaaactagaaatgagagccatgttattgaagactaggatgtgaattccaaaaggcaggcagagtccagatttattttttgtgggtgatgagaacaatagctatcagacagttagaatgcaataaggatttgctgaataactgaaacacttacagagacaagcaaaaataatgaaaggcatgttttagaagttaacctggctatagtgtgcagagtagattgagagggttgggattagtcagagatgccaactgaggggcaatgacaataatttaagtaaagagcaatcaagactcaaatacactcatgactgtggggatcaaaaagggacatttcaaacaacatttaacagcactttccatgtctccttccccaccaaccccaatcctagtccaacctaggattgggtaattgtaactgtaaaatacctcctaaatgcctgatttcctttgccttttgatttcatgttagcaaagtccgttgctccttatggggtaagtccaggttgggaagtgagccctcaggctcactgaagcctccaacctgtgagagctttgttatagtatgttcctgaacaacataaattactcttgatgtttgacagcttgagcataaactcagggacacacagactcttctgtgttcccgtttgtgagtttctgatatgcaagactctgtgagatctcatataccatagagtgtcgatctgcacaggggattctggaggagcattcattctaggttcttaactgtaccaccggtatagataggactgccgcctgaaaatagagagaactcttcttctatgtgttctcccttccttcttcagttcaaccaaatcagcaccaaaaagaaacctcagggcagagcatatgctagcagagatttcaaaaccatcccagactcatgttatatgcttgagatagtcccagagatcccaaggatattctgggacttggttgttagaaacagcgctggttaacttgctttcgttgtatgcctaatccacccatcattgcctagcatgtatcctgttggcctttctttggacaattccaaaattttttgaaggataaaaatttgactaatatattacttatatattcaacttcttggttaaccaagaattgtgtgtacacgttgctatgttcctctcttacggcaagtgccccatttttatattatggtatttgagtgagtgtctttcactacttacttacccatagctccttctagataggaccaagctttacttttcccttcatcttctcgtttcagcaaaatgtatatgccccacagtagaccaccagtacacatctttggactctcctgatttcatggatgttgaatagggacaaccctttttgagttttctatcttgagttctgagtttctaatgtggaaaatacctcttaaatgccaacctctcctgccttcctaaccagtcaaccccagttacgtacaaggcctaattttgccctgcagttgggatgaaaaatgtgaaattgacagctctgcttgtcaaacctgtctgtctgcactacacagctcagagtagcaccatttagagaaagggtgtttggaaaattaaacaaggactgtgtgaataggagacctatcggcctgcaatggaatgacaggtttctgcccacaaactggggttaagacctgcatattgatgcttcttttcacccatttgtgagtaatgggtctcaccccattagtgggtgcatttgttataccactagaagctgttatgcattctctgtaagtctgtgtgagggaactgtagatacacataaatatgtacttgccaacagatctctgtatttatctgcctgtcagtgggagcagacagggcacagctctttgatgggcaagaactgcgggtcaaaaccatgttcttgctgctgctgttgctgcttcagctgctgctgttgctgcttttgctgctgctgctgctgctgtgattgccatggctttatcatttaagtcctgaaggaggctaggggcagcttgttagttctcgttctcacttaacctgggaggctagctctggtcactgacataattaaacagaccttgcaaatgttgactgctaattttcttgtggctagcagagatagactctcaaaaccatgctcacctacaatctgtaatctttcagtgttccttgagagtccacatacctctgctatcttcaaacactgtgtttaatgctgtcctgatgctgtctgatcctggtggattctgccatcaggtgtatttccggctgtatttcactgtctttcaggccctaccccattcaggatatacattgtctcccagcaggaaaaaattattgtgctccaagcgtctaagggaaatagtctactaaaccaagtgcttattttagcagcagttatatccctacaactctctacagcattgactttggtcttcatcatctcaatatgcaatatgccttatgaggaaaaagagtttttttcccccaaagtgaaaccatactaatgataataaactgaatttaagattactttgtgtataacagagcaaaacaagcagagcaggcttgtgtttttaatctaggcctgtttaccagtttaatttgatagtgggaattaattgtgcaatttgtaatataactacagtacaaccaaaattaacgaatattctttatagtcattgctcctccatctcatgcttgtaagatggcatagaccattcttttcttcaaaattcaattttcctcaagattgtggaattgttgcaaaagaagtgacaggaatatttttgtttcttggttagttttcttgttatccatttaatagaagtctaactgaaagacacccagaagtgagctcatcttagatggtgtttctgactgtgcctttctaaatggtaagtggaagagcagaagagttttgtctcagaccaaatttgtaaggaaatagactgatttatcagagagatgaggcgatgtgaaaggtcttatttctgcctgtcaaaaaggtataagacagatgtttcactaggcaggacaaagactggactcaaatatggtggtttcttttcctgtttatttatgtttggtttactttttaaaaatcattattattgttaatatctctgtaatgcaaacatggcagacctgtttttctaaagatcacttccagtagagtagaaattagtaatctgatcaaccagattgacagacaatgaaataaaagtaaaaaaagaaaccctctgttacatgactaagcatatgcttttatttttgaacacattagaattgatacttgggaattacaggttggtgcttctgtgggaatgggctagttaacagccctatttgactttttgctaatcctgaaaactgagtaaatgtatcttaagctattttaaaggaacataggagtttatggtttgctatgagagtctgcacctgcttaagacacaccacagaaacattaaaatgggatgattcattaggaatgaagaaatgtttagctattgtacaaagttttctccagaacagtgtttcccaaacatccctgaactaagaatcatcagggtcacccttgaaatatgcacattcctgagtctaccataaacctagagaataagaaattttcacgaaggggccttggcatttggatctgaaacaagaaactagtcaattggtatgattagggaagtttgggaaatattgttctaaaagatttcttagagaacataggggaaatgatttattaatttactcatataaaagtgatcctatagttacatttcttcctatgctcttcccaggaattcagagccatttcaagtgagtaaagaatagtcttcttttagactggtgtttttgtttttttaaagcatccttgtttctctatatcaattgccttatgctttttactcccaacccttcctagtaaatggtcatcacataaaagttcctagattaaaaataatggatcctgagttctagttttggctagaacacagagctatgttaccttatatcagtatgtaccttctcatcacttcagttgtactgttaaagaattacgaggttgcacaaaatgtaattatactagctgtacattgttacgaatgttaaattcttctgcagccttgtttggggactgtaaccatatatgatgatttttgtgcttcatgagaatgtatgttcaggtttagatatgtccatgagtatttacagagtgttccctatttgtaaaaccaacttgagtcattagtttagtctaagataatcaactctttggaaaaattattttctggttctgggttgccagaagcatcttccaggagaattattgacaagggtttgtcatattggcagatacaggtttgtcacatgatacatactgatttattaaaagagtaagagaatgaggctgggcgtgatggctcacacctgtaatcccagcactttgggaggccgaggcgggtggatcacctgaggtcgggagttcgagaccagcctgacaaacatggagaaacgctgtctctactaaaaatacaaaattagcccggcgttgggggtgcatgcctgtaatcccagctatttgggagcctgaggcaggagaatcgcttgaacccaggaggcggaggttgcagtgagccgagatcatgccattgcactccaacctgggcaacaagagcaaaactctgtctcaaaaaaaaaaaaaaatgaatgaacagttttatgctttttctagttattaacacttttaaatccatagaaatgattataacctcatattgcatattgagattattataacctcatattgcatattgtgaattataacctcatattgcaaattgagaattataaacttcaactaaatgttggggcaaaagaatttattcatttatttatttatttatttatttgagattgagtctcactgtgtcactgaggctggagtgcagtggcgtgatctcggctcactgcaacctgtgcctcctgggttcaagctattctcctgcctcagcctcccaagtagctgggactacaggtgcccaccaccacgcccagttaatttttgtatttttttagtaaagacggagtttcaccatgttagcaaggctggcctcgaactcctgacctcaagtgatccacccgcctcaacctcctaaaatgctgggattacaagagtgaggcacagtgcctggccgcaaaaatgttttttttaaatattcaaaaatagccatggcttgcagttgctataaagctatatagtaactccttcactgggcacaacagaagaaataggaaagagagaaagtgctgctccagaggttcaaaggtgaagatagagcagtgtagtggtggggatttatgtttcctaatctcccttgtcagcccagcatgtcttcagtataaatacacacgtggcagtggcctatgcactcattcacacttcagggaagcccatggtttccttttctcttccattttagcagtgggcagcctgcaaccttttgatcaagctgactttgtatgttacatgactgaactcagctatgccagacatccttaaggaagttgacatttgtgtactttgaaagaaaaaaaaagaaaagtgaatcccaactgcttcctcctgcccttttgattaaaagaacggtaagtcagcaggagaggtgctgcttttaacaagcaggggtgtgcagcaactgattggtatctttctttgaaaaaaagtagaaaagattgatgttaaacaacactaatcagagttgattacagggactgaatgaattcattgatgggaaagaaccatgcttccagagacaacaaaagagattagataattgtcaggggaagagtatttggaatagtgctgctcatctctgacaaccaggaatcagttcccctagctctttaaccattccttaaaataggcatatatgtgcaataagtacagttctctgctgggaacgttgttctcaccaagctcttcatggctgtctctttctgttcattcagatctccgccttcccttatcaccttatctaaagtagtgcttccatcacaatctggatgggcctgaaaactcatttcttggcattcccaaccatcactctatcctctgtctggaaccacctgcagttcatgaatggatcatattctgtcttgctctgtacttttttttttctgttacctatacctagaatccctttctatcctctcaaatctttgccttgttaacttcttccatcctttaagtttcagctaaggcacccactcctcaaaacttgttattgagcctcctcattaaaagtcagagtcccacgcctctgttctctcacagctatttatgcttaagtcaattacagcaggttattcaccctgtgttataattagttggttatttactttcctttctccccactagattgaaatatttgggggcaaaaattatgtcttttgtctctgcatttctaatgttagcgaaatacacagaacatacttggtgtttaattaatacaaatgaatgattgaatgaatactccctacttacctacctccatgttttaaaatcattgcctaaaataagaacagaacccagaggaagaaattcttacacaaaatgggtaattcactgattatctttttaccaaaaagtcatgggacaacggaaataggaaatttaggagctttcacccctgctcttgtctgtggcttctagattgttctagatggcattctcaatacaaacatgagaaagcagcttattgaattgaagctataatttctgactagtggataaatgtgttgcttattttacaaaaaaattatactattacatttattattaattataatgcactgtctttataggcttctcctttaggaacttctaagtactcaacatacatcatctgcctaatgatgtattctgcctcctgttaagaatgttatgcatactgagtacatcgcctaagtattatagaagattgataaatattatataattaataaatagattttacttatttttaaaaacaattttacacattaaaattcctcaagaaatgtgttttgttcttattacgtagcaacaagcaaacatccaggtcttctccactcaacacatggaaatcatcctaggcttttaaagggattcatcccaactagttcacagctgcaacactaatgtcattttatattttactggtaactcgattgagcttagaaaggaataactgtttaataacatctgaagaatgctacaaagtcaaagggaagaacctgaatcattttttgctccaaagacgccatttggaccaaactgccaagttttttttaccacgtttacccagatattggctgcaccggtagctaaaagttgggagaaatttatggagctcaggaaccatttttatcattgctatgctgttctcatttttactttaatatgagattatctttcatttagtttttaaatatatttgtttaaatatattttacatatattttaaatatatttgaagaggcaggctatatatttccagggttcaaaaatcaaaactatgtaaaaacgtcttcacttctccccatccacctttttctctttctattcccattagtaaccacttttattcattattttttttgtgtaactttccagtggtctttttatgcaaaaaaagtgaatatatattccctccttccaccttcttacacaaaagttaaaccactttatacactgttctcaatcttgtattctccagtatctcttagaggtcttttgctattgatacatagagaactgccttaatctcttttatagttttgcagtattccattatataaatgcatcatggtttattcagtcccgattgataaacaatttttttcatttcaaacaatattacagtgaacaaccttatatataaatcatttcatagatgtgcaagtttatctgcaggataaattctcagaaataaaattattgatcaaagggttatatgcatcttgaattttgaaaagttttgccaaattgatctcgacaggagttggatcaattagcagctccattggcatatataaaagtacctttttacccaagcctcaactataaaatagtgcttggttaagcttttggatttttgccaattgtattggtaaaagacggtatctcggtatagttttagtttgcatttttaaaattataagtgatgtcaaccatcttttttaatatgtttaatgtcattagcgtttatttttccataaggtgtctgttcatctccttagccttttctttctattgggttgttagtctttctcttatgtatttcttgctatttatacattaagatgataatccttttatctatgtgagctgcataagtttttcccacttttaaaaattacttatggattttttggccatactgaagtttgtttgtaaatataatcagatttactaatcttttctatgtagcttctagataatgagttataggtaaaaagtcctttcttatgccaagattataaagaaatttactaatgttttcttttagtacttttataatttcattttttatattgaaagatgtggttcattgaatgagaattttaatccagaagatattttaagggtaaaagaggatctgaggaaaaagaaaccatactgttctcagaacttgataagctgtggtggacctactataatttgcatagtacactaaatctcatctctttctgccagtagaatacaatacaattacaacgaaaatgaacaatctggattttaaaaataagaacaaccatgttcacccctttaagttattcacctttcctctttctgtgttgctctttatttatttgtttgcttatatctgtgagaaggccatgtgctagcagaaagagcataagttaataacattatttattggtacaaattctaggactctattcaattcagcacttaaatctcactggtagtaaaatataaactaacattaaatagtgcatagaatatagatggcccttagagtcagaagctctgaattcatctgctgtactccagagtatctctctctctgccatgatttccctttgtataaaatagagagaatgagattgttacttcagtaacaggaagaaaaaatacatacttttaatttaaaagtgctttgagttttatagaaaattcgtccgtgacataattagctgatgatattttcaaattatatagcatatgagtttttggggggagttttatacagaagccttttttcccccatataccagttaatatgtgcttaccttcctctatattttgtcttcagtttcaaaagcagtctttcaataggtatctcttctacatgctggagatacaacagtgagcaaaacaggcacattcaaataatccttgttttcaaagacctaacatttggagaggagaggcagaaagtaaacaaatacatacataaaaacaaagcatatcagaagtcagtaagtccactagagaacaataaagagggagcataacagaaggtgctgggaaacaccttctatcaaagaatcctaaacagttaggagtgagccttaaaagatgtgtaaggagatctcagagttccacgtatactataatgactttctgtatcatagggagaacctgaactagacatatataagtaaccaatcacttatgaacaatttggctttattcaaaatcaaatgacagcttatgtcaaactttctacagacatctcacatgtgcttgggatactcaccgctctcatctcagccagcctcagtgtcagcctttaggtaactctatagaacttgttattgagaatgaagggccaatgctagtgtgattaggaactagtgagattcttgttcaaatcatgtgagatgattaacttcaatagatgcagcatgataatctcagctggaggaggactcattaaatatgaggaccttttctctaccactgatctaacgtatcccctgtggagcctaaagaccagaggtttggtggattataatactcattacttaaattatgaaagctagagagttgttgactgtgctttcctcaaacctagattattgacagagtaatattccttggttggcactcgaactctcatgtgatctaaccctaatttaccttctcagttttatttttactactctctttcacaaaccaaataatctgcttttcccaacgtgtgatgacctttttgttcatgcagtttattctgctcgaaatgatttctccttgctctctatactttgaaatcccaagtatccttcaatacctagtttaaaacatcctcaatatgcaatcttcttccttagccatttctttaggccataactcatctctgttttatctagctatttatctattatctgtctatatatttagctatctattaatcatctatcatctatttatttgcccttttctgagatacttaatatttattgtataatgaatacatgaataaattagatttcttatctttagaaattcaagaaagatataagctgagaaataaaggacggatatgggaatatgggcaaacagtgaaatagagatagttttgagtagattctatcgtctgcttacagcaaaatattaaatataatgtaaatgcaccttgtttgaattgttctagaactagagagttttgtcttaaggactcccaggctgctgccatgtgcgagataatctggaagaaggtctctttttagaatttatgaagagtacttctgagctgatgtgttcaagctatatcataagggtgtagactgtgctgacctctctcacttgatacctgttggcatgctgaggtcggctcttacttcctacctgagctctaaagataagaaagctaacacagttaataaggcttttgtgcccctcattagttgaatctggtattttcaaacataactgtttttcttgaggtctgcgcagcagatggcttattttaaaaattccattctttctgaatattttccataagtaaaaggatgtccctagagaaaaaaaaaaaaactaaggcattaatttaagagtaagtcccagtacctcaagaaaaggcaagcaacaaaatgcagcaggttgttagtatgaagtgaattgtgtaaatatatagcttggcctcagttagtaacatgatatacttatatctgatgagactggagggagaaaatagcactttaagcccagagttgggtttagttatgagttgaaggtgaagttcgtactatttaaagtttcattttatttataggcctcactagtgagtgtagggtttccaagaaagtagaatacatattttctaactcagagcctttcaatgtaatgaatatgaggaagttaatgcaagtattattaataatatgatggaaacctgtaaccaaacatccagagtaaatagagcacagtgaatttatctgattgagaatctcacattaaaggaatttctaactattttatatcataatgtgtgggataaggccttcaagtgaagtatcatcattgcaaataaattccactagactttgtaaccagataaaagaaaaagaaagcaatcatctctggaaactgctgtagtacactcaggaattttcagaccaaggagcctgaggagagagaggtaagaggatctagaatgtgttaccaacccacagagtgctcccagtaaatctgtagacccagcctccacctgaacccctgccttacatcaggtcttcatctcaatctgttgggaatccttctctgagattttatagtgtaattgctctttgatttgacaacagaagttaagcctataccttttcataatcaccttatccagaacatatccattatgcaaaggaaggaaacttgtagagcaataatggtgttttattttagttgtactagatgctttcacttatattatctcaactggtcctcaagataaacctctgtgatgggtgctgtccattttagaggtgaggaaaatgaagtcttagataaattttataacattttatttggaatcttatgtgctcgctcgctctctttctcttcccactccccttcaccccccatagtattagaaaaataagaaagctctggacatggtttggacctcttagtacagtcatgtaaccctaatctagataataatcttaaggaagatttggaatgagtctgatgtagatttcttcgtctacttcttagtagatttgtgacattgggcaagtttttcaacatttctatgcctgggttttctcatctataaaatgggaataacagcaacaataataatagaggtatttttggaattaaatgcaaataatgtaagtaaactgcccaacctatagaaagcaaccaataagagttagctataaaaattattattgtcattattatcttcttttcaataacagcaacaacaaaggtaggaaaattctttaatttgccaaaaggcaaataagatacttaaaagatgaacagttataccaaggtattttgcatgaaagagaaggttcatacccttcttcagaaaatgatcctcagcaaagaaaatatcaaaaggtattataattaataggtcagttgcttaaaatatcacaccaagtatatcacctttctgtgtttttccttcaactttattaggctttgaagaagttctaagacagagctccttacagggaagcatctctgtgcattcagaagagaagaacatttctgagtcctcacgaaactatttcagtatgtatactataataattgtggagcatgaggccactgttgccttcaactccatggcttccatcatgaaatgccatgtactattatgaaatagcacagagatcatgtttttcagggggcaatagcagatgaataaagaacctgtgtaatttagggaggtgtcacatatagcatgctatttcaacaatgtcctggcaactaaaaacggtgtggtggtgaaggtgtctaagaaggtatatagcagaacaaatgacacataaagctgttttgggtccccccccgttaagggaatgtaaaggatctttcttacttacactgtacaaagcagaagagactttgcaaactggacacaacgcagcaaaaattcgacagtggttattgttgggtcagagaattacaaggctgtttgttgatatacttcatgcttttttagtgttttcaagtttcttgtaactaacatgaattactattacataattattttgaagatgcttccgttttgaaatatgatatattaaattttccagtatataaaaaaatgaagagaaaaaaattcctcataaccttaccactcggatatccctattggcattatattttaaacatgtttgaagaattcaaacagaatagaaaaatatgtaattagaagtaaaattctccatcttattttccccaaatacatcaaaagtatcttacatatacttccagaagaaaatgtttgtgtatatgcctatctatcataaatatgtgtatatatgtatactaattttctttatacaagagggattgagcatatataatgtcatatcctgtcatatagcacatttaagtctacttttttttttttagcaactttacagtattttctgtagggtgtataacacagtttgtgttaaccaatcactgaatatttggtgaacactattacttatataatgaaggaaattttaataatctttattaagtgtcttctatacctatgtctaaagtaagccaaaacctctctgcttattatatggttacaggcaaaaatcagtatatttatgtgtatgtatgtgaaagttagagaagatttccttgaaccttaattttacagtataaaaattttacagtctaaaatgacagaatggccacaggcaaagtggataatgtctctttgtgatcctggctgaattgtggcctcacatggaagttggcttccttcttgagagttttaatgcagtcactgattacagtgtctgagattttactgcaatttccatttgagttaaaactgattttgtcttcaaaataaaagcctttaaagacagggaaaataattatttttcccatggcaggaaatctaaatcctttcattttatctcctaacataaaaaagaaaagtactaagaaattactgaaaagttgatgcaaaaacaaaacctctattgaatatttgagctatggaactttattctccaagtatatacctgctaaagtcccatgtatccaaaacagagagagccagatgtagaaaaataacttacaccaaggctttttgtgatgctagtaaaaaggcagctagggctttgtgaaaccatgttgctgcaggttaaaaaccaaaacagaaaacttacccatgtgcttttgaattggaagaagaattttgtttgtgtgccttggcatgatcgctttatgtaaaacgtggagattgtacaactctagtatagaacagtaaatgcacaaacaagccatattctaaccttgaaagtgtgactgctttcaatggcacagtgtatcaaggtcaagagaagctgccctcagcagatggaaaactttcaaagtaaaaaagcttcctttacgtttaaaatatattgagttacacatgatttctaaggaatacttggtcgttctagttataaccatggctcacttttgttatcatgtgtcaagtaactgactcgtatattttcctggcagatgttttctgtggaaaggcaggaaaagagaggtgaaggaagaaggcatcccttaatatcgtgcaataaacccactaggggtcactactttcagtaggactgtggagaagaaaatgtcagaggacacatttgtgtcttggcataaaatagatttcatgacaccttgacttttcaccttttatgcatatggagaactgcttagaaggctccaatgcttatctgtgcctgtgggcctttatatatatatatatttttttaatttgctttaggattgagtcgggaagtatttatatttgaactgtattttgctcagaaatagtttgttgaagctattctgtaacatgtatctcccttaacttttaaaataccatgcaatgaaatgattaaaagtgtttgagtgctttggtaatgcaatgcattcagaaggcttgatctcacatcctgtgtaaggagttatgattgagctttagagatgagatgccacatgctttcatgtcagtgttatggaagtgattttcttctttcttgtttctttcctgcctctcattctgtgttctttctctcctcttgctcttcctctctctcagtttcatgaaaattcatttatctgtgacatttaaagactctgtctgagaggtgtctggagctgtggccggctgtgtacatcaatagtttcttagaatctggcactctgtcaatatttgggggcctcgataaccgcacttaaatgcagagcctgccagccatcatgctcttagtgaatgaatggatattagcatgtcaaatcctttcacaactggcaacacttggtagacaatatataggcatcttgcatttgccttctacacctttctgtttgcctgcctcatttatatgatgtcatgtttcccattacgtataaaaataggaatcttcaaaaagcagtattataaaaattgaagtaaatgacatcattgtgcattctaagtttggtgggttttatagtatacatggtgatggcatataggcagtactttttaagattatattctaggtagttttcgtttgtttgattttgtttgtatttttgcttaggttatgatatttgggccaaaattgttgttgctgttttatagtagaaatatatatatggctctaaggccattgagaccttctaggtgaagtctctatagcttctgtgtgagcctcgtgttagagaaatttggctacacaaagaaaaaatattactgtgttggagagataaggttgttctctgaaacaaaaactatttacatcttcaaacgtttctcagttgtcctccctactctatcagttaaatgtcccatttataaattgaataattgaagcattattatgtcaactttcccatgaactgccctagatgatagcatattggactttcaaggtctacaagggagaccagtattacagcaacatgtttgttattggactgctgtgagctcttaacccatgtgtaaccttgaccgtatcttgtgacaagaatacatcaggaatatgaactctaaaggaaggaatgggaaagatgagagcttaccaaataccagtcttatcttagagatctgtgtccaacctaggataagcatgcaagactttgcccagtttttagtcatgctcagatcaagtaacccaggtttccagatatccaagggaataccctggaactcttaatggtccttggaggaatcattaaatggcctcttccctggactcattgaaccagcagtaactcctaagttggatggatctcaatcttgatttcaattcaggtctctaacatttgagtacttgcttttcatgtaggtgctcaggatctgctatataccatagattttaaggtgacttgttgagactgagaaaagaaatgtctaacgaacagtattaatgcagtcttaatacaactcaggacctatgtgacctttagtttctcatcagaaagggaaatttacatgttattgcctcataattatgagccagccttttgtagggctaacagtgcatttgaccagctataaatgtggcctccagatattatgtcatatttatagaagttattttttaagtgcaatcagtcattgcctttggtagaaggaagttccctttggagtgttgtactaaactaggcagcatggatggacaaatgaatttcccaagggcttcaactactagaaatcatctggtaatataagggctgaccccaaagttttttaaatgaaaaaagaagcatgaaggttgaaagaataagaaaaaggaaaatattatataagtataaatggatttatgacatggcctgcatcaagagatttagtattgttttcctaattcttatacattagactaacatgcacagcttctaatgaagaaacacaaatgctctcctgcccctatctatagttagatccgtttttgtggtcccagaatgaaggcaaataaaacataacatacacagcattaaccataattttttacacggccaaaacttcacctcaagatataatagagaacatttttggtattttccatgggtggcttagaaacatgcctttattattgtcaataagacttacctgctagactaagaccttaccctctttttgctgtggattcagaattttatgactatacattatctgttctttattatatactgtttgttttatgctagacactaatcctttctggagcagaggaagaaacaggaatgagataagaacatagaattagcctgcagaatatattttaataatatattgggaggccgaggtgggcggatcacaaggtcaggagatcgagaccatcttggccaacatagtgaaaccccgtctctactaaaatacaaaaaattagcccggtgtagtgacatgtgcctgtaatcccagctacatgggaggctgaggcaggggaatcacttgaacccgggcggcggaggttgcagtgagctgagatcgcaccactgcactccagcctggtgacagagcaagactctatctcaaaaaaaaaaaaaaaaaaagaatatgagaaattatgtttgcttgtagatcactatagacacactttggaactacattttaatttatgggttgcaatttaaccatctcttttcaattaatactaaaatgttttttgcctaaagtaggcaagatttggattcttcttctttagaaatcctagcaacttcctcagctttctttagtatatactttgtctactaatcacatagtaaagtgagagaaatgagaacagtgggacatatgtgttgatggaatatgcctgattctaactcagcaaggaaggcacatgtattgactttagccttgactactcctactaaaaaagaagtagctgtctgactgtctggcaggaaatcaacagaaaacttgaaggagttgtttaaaaggtctaccttaacacaatgtaaaatctactatattacggagatgagttttgttgatgttgctgtgatgcctaatgataggcaccactcaacagagagacccacacccttgctccaaaagacactagaggtaaacagactatctatgaccagttatatgtttttagtcacagagacacctttattccaaaatctcctaggccaggcgcagtggctcacacctgtaatcccagcactttgggaggccaaggtgggtggatcaccagaggtcgagagatcgagaccagcctgaccaacgtggacaaaccctgtctctactaaaaatacaaaattagccatgtgtggtggcgcatgcctgtaatcccagctactcaggaggctgaggcaagagaatcgcttaaaccccagaggcagagattgcggtgagccgagatcacgccattgcactccagcctgggccacaagagcgacactccgtctcaaaaaaaaaaaaaaaaagaaaagaaaaaagaacaaaaaaatctctccctctcccctatttttgggccaataaattgtcattcttctttttagtttatgaatttatagtgattcccaccccgccttattgaaaaatctacttgccaactttcatctcaaaacgaccccaagtaagaggtgttatcactaataaaagaacgctttttaatacctcaaaatatctacttttttagaagaggttgacactgaattttcaattcacatatcccaggggacagtgtcgttgttccttttggaaaaataagcctttgagatagctgtacatgtctccataatgaaaatcctcttttactcaataattataaaacatacacttttcagtttttccctatgtcatagtggcctggaagctacctatttaaacagccgtcatggacccagcaaccatttatatgcccagaagtaatgaatgttgatttatgtatgtgaatctgttcaaattatatactaagagtagaatagattgtgaatgtataagaatagacaaggcaggtagaaaatgtataatatagatttttatagaataaaatattatataaacaaaacactgggcaaaaatggggaaaagattggacaaaagaatagattagaataagtaatctctttagtggaaggttctctataaacttaatagataagccacttattaaaaacattgttatgtttgtattcaacgaaatttaaaagtaagttagtatagaaattcagactcttgcacaaatggtgctctatggctgatcacccaggaagattgccattatacttgagttcagcttactagtttgtggttgatgatactttcacatttaccttcattgtctcttttctgccaaaaggaaactcactatttgggaaaatgcacttaaatacaaccatttttaataattctatcctgcaagttatagacatagaactctaacttttattccacgaaatatcctaggagagacctaatgaaatcgatttgcccatcgtttgatgataccaggacacaacgccttgataatatattatcttctttcttagcccaatgtaagttttgctgaactaaggcaaagctagtattatgatataactccacgtaaccagcagagcctttaattctgtctcaaatgaccaaaaaataaaaaattctaacctatttattttgtggccagcacttcagaattctcaggaaatgattagtaggagatgagactcagtattgagagatatagaagtgacatgctattgaggtcggtcctggattctggcttgataatctagactacatacatgttttccaatattggcaaattcagtgtattctaaattattgttagaggcatttcaaaacctcaaaatgaaattaattttcatttaaaattatattttaaggaataggcaaggaagagtgatgcaaaaatcacattaacaacaggataccagaacttctaaatggttgcaaatcattattttagatgttgaggacaagaaatgcatgctttcaaagtgcaatgcttttacgtacagtgtccaaataacaacaatttgagagataagtataactaaccacttcagagggaggactgaaatgaacactcagtaaaactgggaataaacaaaacgttgttaaataaaagttattgttagttttcttcaggagagaaagcagacctcaaaagtggcatttcatccactacttcttcatcacttgtatagagaattccatatagctgtattagttcacctatactaatagctggtgagctagcaccaaacacctgagcatgcttatccatgtttcttcttttgtgtgggattgtcttcttttttccacatatttaagactctgaaataatagacatgtaactttgtttcttttgaatcttataagtcttatatttttcattatccgtgatggtttggtaaatgtcattgatggactgaaaataaagaatgacttcctctgtgggaaaaatagcatctagaagtagattatagaaagtttatcaagagtgtgaaatgtcaaactgaaattttaaaatagctataatagtggaatgtataagaagcatgccaaatatagatatttctctgatttcttatgagcatagattacatacttattcatgcttgttctgatttcagataatactgaatacaaacatcttagagagacagaattatcaaacccctccaaacaaatttaaatttaacattttggaaaaaaattctcaaggaagagtcaaaaacattgactttttttatcttggaaaaaggaatgttaaggtagagcgctaatagtagctgttaagcaagtgatgagaagtgggaaacaaggctttctctcttttcttcactgaggtctgataatgacaaaatatgctgcaacagaaaatcttaaggtttgataatgagataggttattaatagtgagtgctaaacactgaaagggaagttgtgagattatcctctatgaagctctttaaccagtatagagtcatatctttctggaatggtctgcatgtgtcagcgagaagggaagaaatgacttctctaagtggttcacattttccaggcactttctccttacctttctttttcttaaagccacagttactcagaagcaaaaaaactgccaaaagttaccaggacttccaaatgtgcttgacgagggtgaaagcaatagaaatgccaccaacattttaatggagattaaaggatcactcttaaattaccatcatttcctataataactcatttactacaaacttgaaattgtggatacagctgctgaaatttttatttatttatttatttttgtttttgtttatttattttttatttatttttattttttattaaataaattaataaataaatttatttatttatttttattttttgagacggagtctcagtctttcgcccaggctgcaggctggagtgcagtggcaccatctcagcttcactgcaacctccgcctcccaagttcaagcgattcacttgcctcagcctcctgctgggataacaggtgcccaccatcatgactggctaatttttgtatttttagtagagacggggtttcaccatgttggccgttcttggtctcaaactcctgacctcaggtgatccgcccgcctcgccctcccaaaatgctgggattacaagcgtgagccttcgcacacggcctgaaacaatttataatacttgtgaagaaagcgattaaagcttattgttcagtgctttgttaaaaaaatatgcagtagacttttagtggaaaatttatcacatttcactttctgtttgttgctgtcaatattaaaagcaaacccattaccaatatactcagaccatttccttcctatggcattaagtgaaatatttttgattcatctccaaaaatatgaagttaacatgtgttggtggtatttgctatgaaataaggggagaggtccacagaatgtaattatggaaaaatataccatcaattcaaacacatacacatgcatataggcatatgcatgtgcgtcagtacatatttacccccaggtctttatacttacaagcacttttctaggaactgaagctgcataggtaaaaatatgtttctgttgctaaagagtgttcacaggttggtgggaaaaatagacatgaaagtttttatgcaaaaagatgggtattgaagtaaaagtatatgcaaggtgttatgtaagtttgcctgggaaagttcttgtttaagtctgtagtcttggtataattatttataaggccctttcactgtcaaaagtgtccctgcttggacaataaattaaatggtcaatctataaatagccatatcaatcaaagatgcctgaggttgtcaggaaagattttccacagaataggacagaaaatcaaagagattaagaatgctttgccaccagtactacctgcatccaaatggaaatgagaaatgggtgtgactggcttttatttctccccggcttgtcagagggatagagtgggaatttaaatcatgttgggtgaggagaaagggacaaggcaggacaatctaaacccagttgttggtatgtaatacacacaagggttgtcattaaatgagtcattaaactaataattttctgaagctctgaactgaaatttagggtgagaaagaactagacgcactggggggattttagaaagatagattatgatatggtttggctgtgtcctcacccaaatctcatcttgaattgtagttcccataatcttcatgtgtcgtgggagggacctggtgagaagtaattgaatcatggaagcagttactcccatgattttctcgtgatggtgagtgagttctcatgagatctgatggttttataaggggcttttccccctttgctcagcactcattctctctcctgttgcccggtgaagaggtgccttctgctatgattgtaagtttcctgaggcttccccagccatgcgaaactgagtcatataaacttcttttctttataaattacccagtcttgggtatttcttcatagcagcatgagaacagactaatatggattaagattcagcataaggaagaacagaacagaaagaagtatcctacagtggagagttccgtgccctggtggtatgcagcagagactgaatgatcactgtgagcaccagattaagacccagaccatgggttgtttaatgttctttaccatatttttgccctgggatcttaggattcttcaggcatggggatttttcagtagctattaagaattctgtgtttgggagacatcaagaagttaaaaaaaattggaaatactataagaaaaaattttacataagctaaaaccactcttgtgacccactctgagcatacactaaaagagaccagggaatataatgcagatctcactgagtttattatttgccacccatcaaggaaaggagccattccacacataatgttcaggagacattcctcactcaggtttccactggttggacacatattcattttaagactgagtaactgcaaatgcttgcttaccagcttgatttgcatagctctgagttacatacgaatgggactcatggcaaagctatcattaaagagaaacaaagcagaagaccgaacaaaggatacattctgtgcaaagtttgaagttgagactgtttcagtgatccttgtcatggtaagaaagctgtccgccccttcccccacctaaaacagaatagcagacaagtgacaaaagaaggccccctggaagtaatatgggagcaaagagtaggatgaactaaaggctatacacatgaagagagagaaaggaattgtcatggacacaaggagatgccgccaaacaccctccattcatagcacggagatatgtgattaggttagaatcacttacctcttccccagtgcattaaagtaggaataggtcaggcctggagaaaggaatgacatcttgatgaaactcagctttctcagaggcctaacaaggatggcaatacagatagagctagaatcttctcactggcccttttgtatcaaattagtgaattcctgtatttccagactgaaatgttttccagtaagcaagagagaaaaggcttctggaggcagtggaaatgactttcgttcttctatggttaagagtacatgggctttggaacaatggaaaactggtttcaaatctctgcagcttacatatttatggtgtgaagtacttaactccctacattttagttctcacatctgaaaaaatattgagcatgcatatgccatagaattattgtaatgattaaattacacatgtaaattgtataatacacatagtgtctggcacaggatcattcacaataaaatttttattcaatgagtactattatcgctttctgtaacattctctagtagccctttctaagctctgcttcactttacatcattacttttgtctagtccttgacattccacctgttccggctttgacttgcttccccagatagtgtacatctgtgtctgcttcaaagcctcattctgttatgttctttaagagttatacctagaattgggccaggcacggtggctcacacctgtaatcccagcactttgagaggccgaggtgggcagatcacctgtagtcaggagttcgagaccagcctgtccaacatggtgaaaccccgtctctactaaaaatacaaaaattagccgggtgtggtggtgggtgcctgtagtcccagctgctcaggaggctgaggcaggagaatcgcttgaacccgggagatggaggttgccgtgagccaagatcacaccattgcactccagcctgggtgacaagagtgagacttcatctcaaaaaaaaaaaaaaaaaaaaaaaagggagttatacctagagttatgtataaattcagtaccaacaatgggcaaaaatgtaaaattgtagaaagaataaatgatgtttagagagtatcattcttgttcttgagtctgaaggcactcttcatcttttgtaatattgaccctgagaccatttatgtcagatggaaaggaacatgtgctgttattttctaccttcgtcccaggaggttaaaatgacttgaagaaactcagcaacttcaggtgaaggacctaatgagaggatcttgaattcttgatctcaaatctgccagggtctccattcactattaaaaagtcagcctagtgaggatggccctagttattaatttgatattatattactttattttaccacagttaaaatgttctctggattagtattgaccctatagttacccacaaggtatagagagaagtcagtggaaattctcttctcaacagctaaagtggtccttgtcaccaaaacagtcatatgctaaatcacatgtcagtgtgacatcgccaggccttagcttctcaggatctacttgttacaagtgagtttatgtggcttgaagcatatggccttgatatatgatcccagagcaaaagggcaaggtatttcaagctggccataattttattgtctctcacaggcttgctttgtagtcattccaataaactagatgggaaatttttgatgctccaagctatccagtcttcaggacttcatttcatgattcagagtccagctaaacaactcaagagtgcttttgtgtgacactgaccacaggaacaaataattgcttagtaattctctttgaggtagaaaattctaaacatggaggaaccatttccccttaatgggagccagaaatcctctaagtgcttgaaatggcattcacaagtctgaatggtaaacagataaaaacaggagcgcaccagttgcacaaatgacttgcttgtcacaaacttgtcattgcagtaatctaacatttctttcacagagcccgatggaaagtatggaacaaacaggccctgctgacgttttggctctgctaagccttcctccgagctaaagcatctgcagcatcttcctgttctagaccctttatctgctgaagttagctgatactgtacatgtcagagaaatgtttgactattgcattaacaagttgatgacaagcaagttattcctgcaactgaaatactgctgcttttagcaggctgccattttgaccttcattttattatgcagaagaaccctaacagagcagagcactggggagaaaccagtgtggttgccccaggcccatacaaagaccacctgcctagggattaggtatagtggtacagggggcataccaggcaggtccattagaagtatggaagggattccttgtaaaacataaatgtgaatacattagacggtttcaaagattgttcttgcaggggtaaaatgaactgcacagaaatagatttcttcctgcatcctctgaaccccacacacatgtgcacatacggctgtgtatgctttatagaatgatatgagatgggaaacttaaatgaaaattgtatataccagctctacacatagtttttgtcaattgttggagttcctgtcatcagtagcttcccttaacctcctcctcactcagcataatatctggagttatctaaacctaatcagacccatgctcttgtcccctcaagagcactgttatctccattagcctcctcatagaaaatttaagcagccctctctaggacatcaccagttcatttccaacctcagctgccagcagggagtactcctacactgtgtaacttcagcctctcgccgttctgtttgaggaaacttcctcccctcagggacccacacttggggttcctcgagtgtgtagtccagagggtcccagcctttaacaggagccttgcctgtaagagaagccttgcctattgccccctatggtgttttgcctttgttgatgccataggtatatcagcacttggaacaacagagagtttgccctaagactttggccttttcataaaactgagctgctcttattcaccaaggtgtcagctgccttgtattctttctagacgcttcaggtctgttaagggtacactgatagtgttttgtctgatttaaatattgacgcaaaaaacttgcattctcgtacttattttctggctggtgccccaggtactttcattttcaaaagttctgtgtaaaaatgataatcattgtccatccatgagaaccacatttcttgccaaagtggtgatgaggcttaactttcttttagacttggcaaattgcacacattactgtctccagggtgaaatgttttactcccatcccaaatatctcttgatgtaatctataccttagctttgtggaacaactacctcagaggacaggtgggaagggtgtgagaagagagcctttttttttttttaacagagttagggatattgtccctggaaaaagaggtgaagatagtttgaggcagcatttaaagtttctgcaaaaggaaatacgtgaatgaacaatttgaattgtaaatggaatttcatcagctttttctttctaaagttcctaataggatttccataatgattttgtgttttccttcttagtagaacttaaatggcaaataaatgatacactatttttgatttagaaaaaaataaaaatcttttctgtgggagctctctttttaaatacacattaggggatagataatggcaaacaaaaaaaagtctttcttcctattcagatggatagctatcagtgtgtgtatgtctttttaatatttatttatttgcttatttgatcatttatttgtctatttattgtaaggaaattaacaaaggaaagaagaaaaacacctcatgataaattaatctcattagatacgtagaattttagggctagaaaggagtttgatgatcaagctatgactttatatcacactcactttagaaatgtgaatgtatgtgaattttgagacccaaagatgtttaatcagatgaaccaagatgcgcaataggattgtggcagagctcggcctaaaactttcatttcaggcaatactccctcagagattacattacattttttaaagctttattttaaacaaagacagtctcattttaataatttgcactgatgtgcttaaatctaatagaacatttgctattatagtaactgagacctcacattggttacaccaactaaggaatatacatttcaacagtttgaagacatttctttctaagccgtttcttatttgcatagggtaaggaaccttagttagttcaattaatttttatcttttgtaagatttcaaagaaacacttgcaccgttcctatttacctaaaaacatgttttttaaatgaatctgtttctttaataagtattcacttaagtaggtcatactgtaacgttcttggtgataaaaaatcttttatcaggataaaagaaatcttatttttattcccacttttagccatgtttgagttggtccttgtaattgttggtttcaacaaaacactaagtcaaaaaatcaatgtttgtgtttatttttgtttaatacatgagaaaaaagtccattgatctttttgcagttatgatacataaatactgtatttttcacttatgcgaaacttaatttttgagggtttcctttttgtttcatttctctgtttcacatttttcaaacatctgtaccatggttagtggttagagtagcagtggctggcacttttcttccacaatgtgagagaaagaaaagtgactggaataaaactttgcttttcatatggttgacttgaaatgcagcattgaaaaggtatcatctctttcttttctgaaaccagaggtgaaacccgccagccaatagcagtactgataccaaatcacctgttgattctgttaattcatgtaagtaaagtctggcaatgcatgcctcacttcatcaactgaaaaacctaaatggatgatctttgtgcattggcagcatctgtctatatcaacaatatatccctctggtcactcacttaaggaagcctgagattctatagtcagtcaagaagtgaatgaaaacttttgcttttgattcaacaaaataatcactttgtaggcatgtttggctgtgaagtgcttactaatattgggctctattatcagagatagtgaagagaagatgacactagtgctttcctttacctcgattaattctagttaggaaaatctatggtgtttgccttatacattttctaatgtaaaatatttaaaacacaggctgggcatggtggctcacgcctataatcccggcactttaggaggccaaagtgggcagatcacttgaggttaggagttcgagaccagcctggccaacatggcagaaccctgtctctactaaaaatacaaaaattagccaggcatgatggcacgtgcctgtaagctactcgggaggctgaggcaggagaattgcttgtacccaggaggcggaggttgtagtgggctgagatggcaccattgcactccagcctggtggacagagtgagactctgtctttaaaaaaaaaaaaaaattaaaacacatggaagtataaaggataatatgaaatacaagaatccagaacccaggttaaacgaagtttaataatttggaacatttgtttctgaacctattttttattattttattataggttacatacagtgaattagacaaattaagtgtataccttgatgagtatacatgtgacaacacccaacccaaggtgcagaatatttataatacctaagaagaatcctttgtatgtgccccttgaaggtgaaattttccaaagttttaacaaaaggtaaagaacaagcaaaaccactgtaacctctatcatcatgaattagttttacataagctatatattttggtttatatgaaatgtattcttctgtatgtattactaaaatttatttatcaattctctcattgttggacattattttaattgtttcccaatcacaaacaagaccacagttaacatttttatagacatatatacatagaagtagaaatgctaaactttaagaaatatgcattttgaactttactaggtattgtaaaacctccctccaatgtatttgtaccaatttatattctcagtaacaatctatgagagcttctccacatgcttcacaacatttgtgatggtcagactttttaaaatttttgtcagtctgatcggaattgaataatatctcattaactttttttttttttttagttgtaagccattgggattttctcttctgtgttgcctaatttgcatcttttgtccatctttctgttgggttatttgttgtgctgttgttattttggaagagttttgtttggcttgatttggtttttggtattagttgttgctgttgttgtaatattctggattttcatattttgggccatagagattacaaagattttttcccaatttgtaggtgcccttttaactgtggctttagtagtatttgtttttataaagcttttaatattaactcaactaggcttattgatattttccttcataatttgtgcttttatgtcatttaagaaatcctttcacatgccaaggtcatttacctttctgtattttcttctaacagttttaaagatttcccatttacatttagatctctaatccttctggaattatttttggttctggtaccctacatgcaccctattttattctttttccatatggataacccagttatcccagcattatttaaaaaattagtcattctttattaactaatttataatgccatcttttgcctatatcaaatctgtttatatgatctttatttgatccgatggactgtttttctatccttgtactaacaccataacccttaattaccatagctttataatattctttttacttggtaagataagtctctctaccttgttcctttttaagattcttttagctcccttggtcttttgctattcaatatgagttttagggctagttggtcaagtttggcaaaagtcttgctgaattttatttgtaattacattaacattagaaaataatctggggagaattgacatttttataatgtgtcttgctgcccagtgacatactatatccctctatttgtgatcatcttcatatcctataatcatgttttaaaatttccatcataaatttcttgaacctattttgtaaaattgttcctcatataacttagattcttacattattatattcatatctgttttccatttcattgtttattggttattattgttatatattcagcaactttgctgagctctcttactactttgaataactaaactggtaaattctcttaagttttctacagcaacatgtatgtcagcagtaaataatgacagtcattctcttaaattctaattcttaaatgttcaattttttcctgtcatattgcattactaaacctcagtatagtgtgaataggatagtcacattaagaatatctattctgtttcttattttaatggaaatgttttagaaacataacatttgcttgggattttgagaaatcgaaattattgtattaaggaagttcttaatatgttcctaaactatttatagtttactaagtgtttttaatcagaaatactagttaaattttatctaatgcattttctgcatcaataatatgataaaattttccactactatgttaatattttataagatattaatacatttcctgatattaaacagttcttatattcttggaaaaaatattcttgctcttggtgtattttttaatctactattgagtttaatttactgacatgtagtatgtttacatggggagatcaatctttaaattttattttcttaactgttactatagagttttgctgtgacaatactggcctcacaaaataagctgagtaacatttcatttttttctatatcttaaacagttttcacattattgggattttttattctgagtatttgtcatctgaacttggtaattttcatcagtaggttgtaggtaggcagacttgaatatcagaataaaccaataaccacagaggaaatttctgattcttctctagtcaattttgggaagttattttttttaaatacagttcacagtttatacttcaatttatttgtacaaagttatttatatattcttatgatttttaattttttgtccttatgttcccctcttattcctaatatttatttgacccttctgcttttttttattagacactagacatttttctgtttcatttacttctttacaaaaactggcttttgattctgcttatctactttattatttatttgtagtctaaatcattactttctgcttttatcagcattagcgttatttcattccttctttttttttatatttttaggccatttttctttttctagattcttgaattgaattattacccttttactttcaataatttttattatctttaaaaatgaatttcagactctaaatttttctcctggtttctcattaggtgcataccatgttttgatacgtagttttgttcaattttaaatatttcataatatctgttttatttttagcccttgaggtatttagaagggtatgcttttactttgtaaacatatttgctctatttttattatttatttctgaatttaaacgcattaaaataaaatgatgtgttttatgtggttttaattgaaaaactttttttagcttattttgtgattttatctggtacatggattttacttctggcttgaaatctgtaggtggtttatctgtttctttagcactaattctaaaattcttttgtgtatactgaactgtgtatttttctaagaaaatataaaatcgaccttttagtatttctgaccttcttcttagtataaaaaaggtggttaacatagcatcttttaattacctattaagtatcaatcttgttactataattgtgtatgaagttttagttttacctatttgtttttaaccatattcaaaagtggtgatcactgttgtctataatcaatgcttaattatatttactaatatttttagatattactatgcctaccattattcttagatcctgtggcttcctttctgggtgcacttttcttgttacttttttttagtaattatttaatgaggaccttgggtaatacatatatttcatataactaaaaatgtacttattttgttttttatcttaaatagcaatttatctgggtattttttgttgagtattttaaagacattactcaattatatcttagactattgttctgtcaactattcttaattaagagaaatctatcaatctgtttttatctctttataaataatctgctttttctcctggtagcttttaaaagttattctatatcctaaatatcttgtagtttctctgaaatgtgtctggacgtggatttattttgaattattagtcatgaactcaggatatacttattaatctcaggactccagttttggaaaattctcagctattatccttttctttattgttcctttgtcattacttccattttctttttctggaattcttataagataaacattggtattttctaatcagcttactgattagtatctcaattgctatttcattttcaaaaaattaattcttcttgctacaatttttttctgagtgaattccttaacattaccttccaatacactcaattctttccttgaaattcctttatttcatttattgtacttttatattaatgaacatttttaattttttaagatttctgattaagttttactcttattcacctattcttattttatttctatctttaatcatttcttgttcttttttaggtatgagtactttatcactaagcatctcaagcatattcatgctgaggtcattgtcagataatttcataaaatcaaatttatctggagtgaatgttacaattattgattttcttaccattacttggttatgctttagaattttgttttacaggttttgttttgtttgtttcgttttgttcacatgtccctaactaggggttttacagttgcctttatctggatcttctcagtcccaatccagatcttacaatggtagctttcagcttcattcttatatgaatattttatcataatgctgtatctttattcttccagctctcaggtcctgcagccctatataagctgtttccccaggcagtagttggccaaatttttgtagcctcgtgataaagtagtaagccaggttcaggtccaccatttcaaatggagcctctttgacctcattactctaaagagctggaattctaggtatctcgatgtgattctagatccagatttcagcaggcctatggcttcagcaccatgggctgcttttagtagctttctgtaactaatcatcttctttttaagtctgactgtgtttctgtgattttcacattttatatttcacggaatttttaaggtaacaatacatcttggacaatactcctttgattcttatctctctttattatgttttttatattatttttattgtgctttgctttattgcacttcgcagatattgagtttttcacaaactgaaggcttgtggcaactctgcattgagaaaatctatcagcaccatttttctatttttttcttttttttaaaatttatatgggtacatagttagatacatcatttaaaacacataatattacaaattacagttattgaatgtttagttgtgctggtcactaagcattacatattattttttcccaatcctttctacgttcagttattcttatttccattttttagagcagaaagttgaggtaaatagtctaaataaatacaccagtaggaaagagattataacaagtaaatggcagaaataatatttgaatcctgtttttgctaccaaagctagtgtccttaaactgctatcctatggttaaattatgttttgttatcttttaacattattatggttattatttttaatgttaattaaattaactaatattcgttttataaaaaatatatctagtactatctcataaatcttttttatattttctatgtttttatgcttgcttggtctattctcactcactttctcactctcactctctctctgtcttttttgatgtgtgattacctttttagcttttatcaatctagcaatttgaagttttaaagtacagtttattctttcggtaataatcactgttgtttttctgaaaaacattcaagcctgtttaattattgtcattaatgaagtagtatcctacatgaaatgagaaatttaggatgctgtttcatctgtctcctcttatcactcaatttattatttttgttataacaccttatatcaggtatacatttttttttttttttttttttttttttttttttttttttttttttgagacggagtcttgctctgtcacccaggctggagtgcagcggcgcgatctcgactcactgcaagctccgcctcccgggttcacgccgttctcctgcctcagcctcccgagtagctgggactacaggcgcccgccaccacgcctggctaatttctttttgtatttttagtagagacggggtttcactgtgttagccaggatggtctcgatctcctgacctcatgatctgcccgccttggcctcccaaagtgctgggattacaggcgtgagccaccacgcccggctaaattattattaatttttattttacagcagtccagagtagtcgagtattctgtaacaaaataacagggttacttattttggatagtagagggtttctagcacaaagtaggtgcttaataaatattggttgagtgttaagtgaatggtggacctgtttggttacacacatgcacacacggagaaagaaaacatagctgagctctcattgctgctgatgaactaccattttgtttaaaccttgtattttataaacagttgaatcaccttatgatttaataaataccttttctgtcaattattttgttaggcaaacacatgctttgttaatcagccctttgaaatcagtgagcttctatcaaagttaggtccattcatggctatttccacatttacctcttatgccctacccctcttccacaaataataaatatatttggtaactctcgtttctaaaccagtgactaccgttaagttttcatttggcaaatacagtgggattcttgaatatatatagcaatcatcatatcatattaaatggatgacagcccacattcttccacaatagttcgtgttgtttactatttaaatagaggcattttgaagtagttcctattttttttttttttattttttaaaggtagttcttcaaatccctaactatagtcaaaagaaatcttttatatgaatttgctgggaaaattggattttttattgatatgattaagaaacttagtgaaaatctgcaatatgctaggataaaaaatactgtgcttttattgtggcaaagcagattaaataaaacaatatagattagcaagggaaaaagcaaagtataaataaactaggtcatttgcagatgtgcaaattttatggaaattctaatgatacatttgattgatttataagaagtacatattattcatgttaaaagaacactcaagccttctatgtggcatgattttaacaatcttttatacataacaacagattgaaattaaactgccttcctagctgtttctattttttaaattgtaaaaatgacttttattattctctatctaaaagtcactaaaagagaataatgcaacttagtttctagtcctagttctgtcatttaattggctccatgaccatgggtagttcattaaactctgtaggccacttttttttatttataaatgtagacagttggttttgatgtactttaaagccctttccagttcttgtattctagtactccacattgtgtctccctgtctttatatagaaatacccacttataaaaacgtaagtgcatatagggtccatatagcaataacctaaattattcaacagaactcataagggaatatccaagaatgggatgaattttcccctgaatgaggcagttgaatgtagctgatagataaataaccaggagctgtcataggttcttgatcaggactgacatgatgaaagcatattttcaaaataactgttcggcatcagtgtgcagaataaatcagaatcaaagaaacctggaatacagaccaggcagacatgatgccatcattcagagcaaggtaaggagagctcagactatggtgttacaatcagaaatgaagttgaagcaacagatatgaagatattgagatatatgttcagtcaaatagaatggctaaaaagaatataaagagaaaaattatgaaaggaaatacaaatatctaataaacatgaaaaagtataattcactaggattcaaagtcatgatttatgaaaaatagtaattttcagtgctggtaatggtacagtgaaatagacactcatagtgatagtggatatctatatattgacacaaaattctgcaaagtaatgtagcattatgttatccagaaccttgctttaaaaatatgtcctctgacccattaattttacttctaggcatctgtctagaggaaatagaatctcagacaaagatttaggtacagaggtgtttatcacaatgtcatttataaaagagaaaaaagattttaaaatcttaaattacaaaattcgagaaattattaaattattgaatatccatatgtatcaccacatatcatatatgcaaattagatagttcttaaagttattttaaacaatattttattaggaaaagtttataaaataacacaactaaaaattcctggtccaaaagatacaaataaatatatatacctaaaacaatcccaaatataaaaatgaaagtattcgataatgatgtaagagaatacattcaaatgtaaagaggagttatctctgtatggtggaattacttgatatttctattgcctttttattgaactttcttaatgcttgaaaaatactctgataatttgaaaaataaaagttttaagcaagcagtaaataatctaaacactgaatctcaaatttggtaataattcaacttagaaaagaatacatgtatgattccaatttattcagttactaaaatatgggatacatagattttcagtttccccaaactgaatcatatcatatttcataatttctttttcttttttggatccttgtacctttgccttaagtgattagcctgaacttcgatgttccagaacctcatttttttcttttcttttcttttcttttttctttttcctttttctcttttttctttttttcctctttcttttccctttctctctttctctctctctgtttctttcttttctttctttcatctttctttctgtctttctttctttttttttttttcttttttgttggagtctcactctgtagcccaagctggaatgaagtgtcagatcttggctcactgcaacctacacctcccaggctcaagcaattcttgtgccacagcctcccgagtagctgggactacaggggcgtgccaccaagcccagctacttttttgtattttagtagagacagggtttcaccatgttgcctagggtggtctcgaactcctgagctcaggggatccacctgcctcaacctcccaaagtgctggaattacaggcgtgagccactatgcctggccctcattttctttagaatgtcattttcttcagtcatttctaagattaacatactcaaagcacatttacatgtatatgggatcatcctctcttatcacaaaggaaagaatctagattgttctttgttttcaatcatttgtaatttctaaatttctcttatgaaaatatgcaaatctaataatagcattctgagtaattgaaacaagtgaaaataaaggacacagtatgtcaaggaagaaccacttttattgggtggaataaagtactactgataaaatttattaggcactcatttcaagaatagaatctcggttgctctgtgtaagaatgaataaacataacaacttacttggctctgtacccagaaatttacccaaaaaagaaaaccagtttgatgccagagagaatgaaccagataaagttttattggctcgaaatatacaagtaacttagtctgcccctttagtaacaaaactgtacaagtaaaaatataatctttaaaatctaagttccttacattagccaatggcatagtgctggagtaactaaaactttacagacctcaccctcttttccttctgccaggagaatgaactactctctctccctcaggcctccactgactgtataagttaacccagaaccatttgtacacaagcttgtctctttttcagaactgtaagtctagtgaaggcagagactatgtcctgtttatctttgtatacctcaggttctggcaaagtgcataattgttgaacgaactaatgaaggattcttagcctagtttttgagagtttaagtctctatgaaataatctaaggaaaagttccttgggtagaaatgcttacactttgtgtgttattccataatctatcttactagcatctaggcaagtttctttggaataatgatatcaccaagttatgaacacctttagaagtaaacatctttcaagatatttttctgcagggctgagttaaagtacagtagtatagttcttcagagctctttcagttattattgtggcacccagaacaagttactaagtctctctgaatttcagttttctcatctgaaagatgagaatagtaatcatctttgtctcgtagtttgctgtggggattggatgagatactgcatgtcaaataacatcatgcctagctaagcccttgggccattattattagcattaatgcctcccaggacaagtagttggacttgcacatatgtcttgaagactgggacagagtatacaggtgtagcagcagggctgtcgctggatatagaattagagagcttaagtgcatatgccagtgctttcaggcttaagtagcataagaattacttggggagcctgtttaaaatggagatctgagttccacctcaagagatactaattctgttggtttgctctggagtgagaccctgaaatgtgtctttttaacatgctcagcaggtggttctgatgcagctggtcctagaccaggtactaagttaccctgccatcatgactccatctcagccttgatcacaaaccactctaaccccatggcattattccttaagattggccctgcttaatgctgtgtggcttgactaccaaaagccttgctgcttccactctgtggctttgttaacagaagctttccttcctccacgtcctcaccccaccccgctgaaggcagaaaaaaagaatagggaaggcagagtcaattgggaaaacctgagtagttacagtaaattatgttattttgagttctttgacctaatgatctgcgttagtccaaaagtgggctgacttgagaggtaagcttgaattttagaacaatagttttcccccaataactatggaatggctggctatatctcttgttttttatagaattgctatctatagaacttagatgaataagcacaattgaagtgcaaagtgttaaacgcatgcttcgatttagtcaatgcatttgcacattgaagtaattaggattatttaaaagcattctgcttctaatactttgttctccatttcctacaaatcaaattagtgaggggtagatttgattttgacatcattttgaaaatattttctttctttttttaatttccttagtattacatttttacaaagttcaacacacaaccaactgtgactaaattcataaaaacaaaacaaaaagtccaaagtgcaagaaaatgaaaaacagcacagagtaatatgcagtagaacaacataaatcataccttacaaatatagttgtaataacacaccttatccatgtctgatcaattaataagaaatacttattcagatagcaaatagcttattctttcactttgattgagagcccaaatttaattatctcagtccaaatcaatatgaaaaggcaaccagatctgcattgaaaaaatcttaaccatctcctgttttcattgtactatatgtaatgcaatgaatgaatgtgaaggaagagtaaaaagggtgctttccttatttgctaacaaagcattcaagcaagattattcatttttaaaataaagttagattcagcagaaccaagaaatggttatggagccatattgcatagacaaatacagacctgagtttaaattctaactctgcacactgtctgaattatctttgacaagttacttcagctctctgacccacagttttcatgtctgttagagtaataatatctatctagcagagttgctttaataatatattgaatttaatatttacaatgtattataatatatcatattgtattatacaatatattaatatattgtatttcatactgtatttataaaaataatgtatttgaagtgcatggaatttaatatttactcaataagtggcagttattatttttaagtcaggaaataaaatttggagggatatgaacccaaaatccttagaggaaaaacaaaaacttaaaaaaaaaattctatgatctcactttcccagaggttatttacacaagtcacagattttatcctaggactttatcaggattctacagaagggaatgttttacctttataatcttctttcccccaaattgttatccttattgcaaattactgacctcaaaatacatgttgagaaataccctttatactattgaagtgcgtaattgaatgcatatattttgccaacacaaattattatcatattcttttgtttaaaataaacagtatttcagactggctcagataagtctaattcctcttattttttctatactacttttatagttctagaagtatgtgtttatgcataaaagtgaaggtggggagagagagagagaatggacaagaataataaaatcatctgtgcaacagagatggtgccctgttcagtcctgtccttagtgatcgactctgtgtttcatgtatagaaagtgctcattaaatgtttgctgaattaagtaaatgagggaaaacaaaatgctaagaaatatctgtatagcataaaggagccaactcaaaagtagtgtatgcaggttgtaggcagacaggtaaaactcacctatggacatcaacacctctttagttaggttggctcagtgtggaatgaccgccatctttattcagaactattagttcttaactggaggtggtagctaatccaggagacctgactgatctgcggtcagagagtcatagaatgtaagagccagagaggatcatggagagtttctgatcccagggcctgcctcatttctcaggttaagaaactgaatgtctgccaaacacttcgtggcaaagtttgttggtcctaaaacttgagtttcctgattctgttcaaattcattttgtattgtgtcatgctgcctttgtgaccccaaacttcctgtccacctgggaattcccatctatccactggctcctatggctaaaaaatgtgcaatggagcatccatcaatgcttctgattagaatcatctcacctattatggcattttccatagagcctaaaagaccacaataaagaggttcttcatttgactcttaaaatcaatgttttcatcaagaaataaactttattaaattattattaaccattaacaactcacccaaatcagtttcttttcaagtgatgtagctggaactaaagggaatggagaacaaatacctgttataacttgattgggggaaaatgtaaacgaagagctctgtcttcagggtgttactcaggggaaggcaaggccaggtgggctatggcaggggagtccagagtacccaggaactcacccgaggatttgaatcttagagaaatgaagagagataagaatatgtgaagatatagcaaaaagcggaggttaaaaagggaagatacaagtagatttaatgatttggtcttctggttcattacttactactatcattgtaacttcttcactcagtggagaaggcttgcattcaggtcattcatgtcctgttaacagcttatatttatactctctaagtaataactcaaattccttgaatcaagtattgataacatccatgagagaagaaataaagcatttggtaggtaaatatcttccctatccacttaaagaatgaagtgttgataggctgttgatggtgagttaaactggcataccaggaatttttataaatggttttcccatgctccattgaatatgtggctgagactctagttgtataccagctgtgcatgcaaaatctcataattactcttactgtattaagcattttatagcaattttagctctaaaatgctatgcgatagtttttatgcaagtgtaccagacatgtaagctgttccaatgaaaacattttctttcttttagacacatggttttaggtttccaaacttagctctttgcattgatggaagaatctttaggacaaacatcaggtttttcgtggggggagagggacagtggattttcttgcgcatacttcaagcagccttatcagtagaggggaattttactaattagttgtatagtactcatactagcaagtactgctgctgagcactagttcctcctcagcctgttctattgagaaaggcagcgaagagaaagctagggttatctctccgtctctctggggtgtaatgacaaacaggcagaaggacttggacttaacctctctgcagaaggctgacacctttaacactgctgcacatgctgctgcaccctgcagtagcaagtcttgggcctgagcccaaagctggtgtggagtttgaacccttggcattctggcccagagccaagtgctatcaatggaaccccactgacacctttagttattcttcctagattaggatagtaatttacttgtctctttgatttcaagtgtctggttttgtttccagatgcctcccagctcatctgtattccaggggtttcaaaagattttaacctcattggttgtttcctttgtcagttccgtttggtgaacacaggagggatacggagaaactagagagagggaggcaagcgagggggttttgtatgtgtgatgtaggggttatatgggggagggcttggtgagactgaaggaataaatgaaaggcatattcacttttagaatatcagctattatgccaggataagtcagaatggagtataagagatgatgtgtaggacaatgtagcaaaaagtagtattacatagatgcatgtgtaaaagccctccaaccagcagtaatctcaacttcccccaaaagattgcaatatatgaaggagatggagggaccatagaaattttatcccaatgccaataacataacagaatttggattttaacatgctatagtaggaaacggcatttatgcatggtgtcatttcatatttacaagggcctgtctagcactgtttattgatttcactgcaatttttttcccgaggaccctgtagatagataattgctagaaatgtccatcattagcacagcattgagtgcaaccatcacactaagaaaaagatacacataggaccctgcgagcaagcatcaaatagagagaaaagtcacacaataacatgtgcagctataactccaggcaaacacacacataacaccctgtgtggccattgcactgagaaaatacacacagccccctgtgtagccatcacacatcaggaaaatacacacatgacacccctatgcaaccatcacaccaggcaaaagcacagacataaaatgctaagtcaataggaatgaacagctcataaaagcctactggaatagatcacatcacagccaggtacatctgttctcagcactaaccattatcattagcttaaaatgcttgaaatcactgtgcatcctcaggtctagggacagattattccaagaagattctgctaaatagatttggcaatgcagtgaaggggacctctactacattaaagtgatacattttgcatctcaaaggctgtcaactgtatttagaggaactgtgtgattgaagaacaatgtgctaggataggatagcaatttttctggcccttctaaatctggaggtgctttttaccccgacatgagttaagtgtacaattgaatgggcagctcttagattgggaggtgactaataaaagcagaattggaaatagctttcaacttgtgctgcaaaggaagctgctacatcctgttttaaactggaactctcaggtggtatgtcacatctaaaggtcttagtgaggtcagacttcaagccatcaacttgagataaataagtagcaactacagtccttgcttcatagggttgactgcccaactggggggaataaaggaaccacccacctcttctttagccagtgccttctctttatcctcttgccttggtctgtgatgttatcctcgctgtgtgacccaggggttaccgcactgtgagggaaactcggcatgcccttctgaagagtggcccaaaagaactggttagaaagagtttcaagcttccgtgtttcaattacagtggcattttgtgtttctactgagtgagagaagtttcaagttagcttgttaagaatgatttacaccataattctaggaaaaacaaatgtgagtgactgaaatttgaaaggaaagagtataggggggaagtgccagactaaacgaatcctaagtaaatagggtgtttctttcgggggtcggtagggggattggtttcttttaaaaaaagaaaaaaaaagaaaaaatgtatgtattgttggtaattacttcttttacctggaaagagtgaagcaggaaaaaataataataataattgctccatttgctccctgtaagagcaaattttcaggagagggcaggtgtttcccttacatttgcatgacaacatcttactgggaatgagcagtactggatatgagaactaagaatttcacttctttttttttctctaaatgtggcagaaaaggttttgttggggtgagataagcattttccatgaaacaatgcagtagtgacattaggtaattacgtggtgactgggacacaccgcatggtatactggagaaattgcatgatacctacatgataactgtagtaactttagttatcgctaccgtattatctcctgataactatataattagtttgtgtcatcaaagcaccctaaacgtatgcctgttccagctactctggtagaaaaaagaaaataaactttttgcaaggggggagaaaaagctaatgaagaaagttgccaagaacagatattttgtaatctgtgctaaatctctgctggaaaacatgaacagtaatgaagctgagaagacagtaaaagaaattcggggcaaggtgccagacgcccagacggaaggagaatgtggaccaaaagattgcgacaatcgggtaattatggtttatgaatttcagctttaatctgtagttcagtgagtcctgattaaatatctgttaaacacaattaaagtttgtttttgtatttcaccgtcttgatcagaataattagagactgcgtgtttcatgtcaaaagtagcaagaggaattttagtgaatgaacatcgtttttaaaagccatttgtagcaccagctgttggcattattttatattttagtgttatcagcataaagatggtcctctggatgctgaatagtttccagcaggacaaggatgttatgctgttatgatgggcatgtgctgatgaggcttaaatgtttaagggttagtgttcattggaaacaatggacaagggagatgtaggtcaggcaagcagatattttaggtaagagaaggaagacatttgagttaactttacccatgcaaggcgtgacataagggaatttctcatggtatagtcattggtgttaacacctgcaacgctggtgttatttgcttattgagatgtcaatgtagtgcctgaaggaagagcacaagaaagatgtaatgagaagtgctagaattctgtcctggttggttctcagctaaacacgtgtgccttttattcctagagttaggagaaggaagtgcagaaagcacttactgtactaataattctttggctaaggatagcagtatgaatgctcaaaaaggacaaatttaaatataaatgggattgactaaaactgggtaaaggagtaaaatctggttctacaaaccaaagctaagaccatgatttccacacacttgtgccagaagagaaactggagagttgtacatcacaatctccttaaaaattatgagggtatatgtaaaaatgtctgtgcagcttaccatgctatgaggtttaaagaaataagataccatcttgcttgctatttgaaatttgggcacctagaatatttcggtctctgtgacagacagattaatgcccccctccccaccccaccgaagatgttcacatcctaatcctcagaacctgtgagtatgttgccttagatggcaaagagactttacagatgtgactaaattaaggatttttgagatgggaagattatgccagattatctggttaggcctaatatgattataagggccgtttaaaggaaagaggcaggcaggaggatcacagaggagatgtggtgatggaagcagaggtcagagagagagagagattgaaagatgctgcgttgctggttttgaagagggaggaatagatcatgagccaatgaatacaggtggcctctaataactggaaaactcaaggaaagggattttctcttaaagactccagaaaaaaacataactctgctgataccatgattttaggactttctgacctccagaactataagtttgtgctaatttgttacagcagcgataggaaactaatacagttcccatgaacctgcttcatgaacttgatttctattgaaagttatctagttaagagtacatccagctataggaaaaataataagcctttattaacttaatcttctaaggcccattttctaggctgtctttgtggcatcatttggaggtatacctgctatgatatgaattttaaaagcctatgtattacaaattaaaatcatgggcaagttcaaccctatgtccctagcactagttatcagcagtacattccagactagaaaagttttcagggagggaggattgtagagtgagaataatttatcttacaacaatagcagttaacttaataaggtaagttgattacttaccttaggtttaatcacttgactgtggcaacaattgaccatttttaagctacagaaatggcaatttcataatgtttaatatacccagtgttatctcatttaaacattctaagtacttcatgaggattctaaaactaagattaaaatttttaccgaagattaatacattttagagttatgcaaagttcaggctaataatgtaccttattttcatcattttcagttaaaaatgggattcggttcaaactggcccaaggtgtctttgcagatttgaggatgcaagtatgtgtctcatctgctattcaaaaaagttaacagtataaaagtcatgggaaagttttgtcaaatagacaaagacagtggtagaaattggctacccagcatctttgtattgaaaataggatatagaagcatacctctttctattgcactttactttattgcactttccagacattacattttttgcaaattgaaagtttgtggcaaccctgtattgagtctgttggcaccattttttccaacagcatgtgctcacttcatgtctctgtgtcacattttggtggttcttggcaatattttaaactttttaatcattattatatttgtttgagtgatttgtgattagtgatctttgatgtttctattctgattgttttgaggtgccacaaaccacacccatataagatgacaaatttaatcaataaatgttttatatgttctgactgccttaccaactagctgttccttcatctctctccctctcctgggacttccctgttccctgagacataattttgaaataaggccagttaataacccggcaatgacctctaagtgttcaagtgaaaggaacagtcacgttatctctcactttaaataaaaagctaaaaatgattaagcttagtgaggaaggcccagaaaggctgaaagctaagccccttgcactaaacagtaatgaagttgtaaatgcaaagaaaatgttctttaaggaaattaaaagtgctactctagtgaaaacactaatgaaaagaaggcaaagcaaccttattgttgatatggagaaagttttagtggtgcagataaaagatcaaacaggagcggtggctcactcctgtaatcccagcacttttggaggccaaggcaggtggatcatgaggtcaagagatcgagaccatcctggccaacatggtgaaaccccgtctctactaaaaatacaaaaattagctgagtgtggtggcacgtgtctgtagttccagctactcaggaggctgaggcaggagaatcgcttgaacctgggaggcggaggttgcagtgagccgagatggcaccactgcactccagcctagtgacaccgtctcaaaaaaaaaaaaaaaatcaaaccagccacaacattcccttaagacaaagcctaatccagagcaaggcactgactcctcaattctatgaagaccaagagaggtgaggaagctttagaagaaaagtttgaagccagtggagattgattcatgaagatgaattaaagaagccatctctataatataaaagtgcaaagtgaagtatcaagtgctgatagagaagcaagttatctggatgatctagctaagataattgatgagggtggctgacctaaacaacagattctcaatatagatgaaatagtcttctacttggaaggaaatgccatttagggtttttatagctattgaggagaagtcaatgcctggtttcaaagcatcaaaggataggcttactgtcttgttaggagctggtgcagcaggtaactttaactgggagccaatgtttatttaccatttagaaaatcctagggctcttaggaattatgttaaatctaccctgcctgagctctataaatggaataataaagccaggacaagagcatatctgtttatagcatgatttactgaatattttaagcccactcttgagacctaccactcagaaaaaagagatttctttcaacatactactgctcattgacaatacctggtcaccgaaaagctctgatggagatgtacaaagaggctaatgttgttttcatgcctgctaacacgacatctattagcagcccatggatcaaggggtaattttgatttacaagtcttatatttaaaaaataaatttcataaggctatagctaccgtagatagtgatttctatcatcgacataggcaaagtaaattgaaaaccttctggaaagtatccaccattctcgatgtcataaagaacatttgtgattcatgggacaaggtcaaaatataaatattaacaggcatttggaagaagttgattccaaccctcatggatgactttcaggcacttaagactttagtagaagaagtaactgtacataatgtgatgaaaataacaagagaactagaattagaagtgaagcctgaagatgtaactgaattgttgtactttcatactttcattatcaaacttgaacaggtaaagagtagtttcttatgggtgagcaaagcagtgagtttcttgagatggaatctactcctggtaaagattctgtgaacattttttgaaatgacaaccaaaatatttagaatgttttataaactcatttgataatgcgatggcagagtttgagaggattggctccaattttgaaagaagttctactgtgggtaaaatgctatcaaacagcatcacctgctgcagagaaatcctttgtgaaaagaagagtcaatcatgtggcaaacttcattgttgtcttattttaagaaattaccacagccaccccaagcttcagaaaccaccaccctgatcagtcagcaaccatcaacatcaaagcaagaccctccaccagcaaaaagattaccactcagatggtaatcttgaaagctcagagggtggtgagcacttttcagcaataaagtatttttaattaagatgtgttacatctccaaagtatccctgcactaccacagagggagacaggaaagtgtagtggtgaaaggcttggacatggcatcagacaggtgggatatgaatcttggttttacccctcattaccaagttaaataacccctcatctgactttcctgatctctaagaatagataataataatacctaattcatggacatagttgctgggaggattaagtgaagtaataaatgtaaagcacttagagcaggacctggtacataataagcaacaaatgttagctgctgttgctgtcatcatcatcatctactgaaaagtaacagactcaagagaaaccttacagggaagatgtgccttatttattgttaagtcttcagtctagaaaaacttggtaaacttaatattcttacttactgtagcaatacactatttcccatggcaaaattcactctttactctgctttgatagtatgtggaaaaatatacactgtttcttaatcactgtattagaagattattgcattcattgtttttcataaaacaaaaatttaagaacagaccaaaacaacactgcatcaatgctgataaatataaaatttgacctacatttagaattatatatttttttcatattgtctgtctggtgcctaagaattagtttttcttattattatctaatcttcacagctacaataacatccctgaaattaagctaagaatgctacaaacacaaactaaaagcacagtgggctttccacatgattagaatgatacctcccttctcatcgtctttgaactagacatctttttcccgtgaactccaagaagggttagccagcctgtgaggcccaccattccccagagttggtgctggaaaggaaaatatgtctactcagccagtgataggattttcataggtgttccttctctacagaaaatgttgaagccagcagccttccaatctacctagggaggttaagaataatttgtttcagaatggtattgcttaaagagattcccagcctcttttagtttatggcttccattgataatatgatgaaagctatggaccctcttcccaaaagagggtgcaataccttttcaaaggattcacaaaccccctcaagcctattggtggacctcagattaattatccctggttcacaattgtgttctaagtaaatcactgtaggactgactgggctaacaagatttcagaccagaattgtgcaatacgtatttaccatatgatcttggaccagtcattaatgtaaattgaggtcctggcttttaattagtaaaatgagtacttttaatcctaatgtgcagggaaagcacctatttatttttagagcattttgaggtacatttaaataactactgtaataaagagcattgatattggccttgtttactatttatttactgtttggtcattaatttattcattcactcagcaagtatttgttgagcacctactattccagacactggaaatacaatagtgatcagaactcacaaagtcctccttccttctggaacattctagttaagggagatagttaataaacatgtaaactcactaacacacaatgaagaatgaaatgaagaaagtaagagtaaaatctcacacggatggcatgtaaggagatggcatttggttgagacctgaatgatgttagaaactagccatatgaagatgtgaaggaaaatcatttcaggcaaattggaatagcaacttcaaaggccttgaggctcaagtgagctaggcatgtgaattatgacaggtcagtgaataaggaaaagtatactggtgatgtgttcagagaaggaatcaggaaccagactatataggctgtagagtgagaagtttgaattttattctagttacagtaagcagccattggtgatttttgtagtagaatctaatgtcacattgaaagaaatcactacagtttctgtgtagagaatgggttgtagaggagcaaaaaggaagtaatcccagttaatagttaagaaatgtccaaagttgaagacagaaattaatctcatggcagtgtaatacattgcctcgtggagaatttgaaatgtcttttgttgaacagccaagagaacagaaactgattcatgagatgaatcatgtagcatgtcctatgtctttggccatttataggactatttaggggcgtaaaagtgttctttctgaaaggaaggggaaaaggaattgtgagtacagtccagtattgttcgcaaatgaggtactgttattagcggggagggaggattgttgaagtaactgataaagtccttagcaaccaggaatctcaataggtaagggaattattgggaatatgggccaattttatgaaggttcatcacaagtgtgcttcctctgtttcctgaaagctgcctaagatcacaggtgacctaaagtcttcttctgtccctttttaatagaagtttaaatgtcctgattctttaccaccatccacccctcaaggtagttcccagaaattactacactgaatggtggaaataggtaatgtaatttgaatgaacatcagaaaaggaaaaaattctgttgtgtttataggtgtttcccaatagaattaaaagattaagtctgagggaatgtattaacattagggctgtagtgagtcaccagtattgcttgaaggaagtttagtgctattattccttgtcaaccaactgaaatactttagtaaatggtaaatcataataaatacaactaggaataatgccatgtgtaaaaataataatttattttagcttatataccacttattttcactaataaactaaacaattatcttaatcatttctcaatcacattcatatataatgcaaatttggtgtagtatgcaattacaggtgaaaatatatctagacagtcattcagaaggcaaggagtgggagcctttttgaaaagggcacttctataagactataggttatagctccagggtaagtatgaagagacaagaaactgcattagagttcagggtaactgacttaaagtgatgttgaatttcataatcagagttcctagaatgaccttgcaaattatatttccaggaaaacatgaacataataacatagtatcatggaatagccttattctgtggaccaaaaacaattaggtactatatatgaaaaacatactgcaaatactaaatgtactgagcttattcaaataaaggcttaagaactggttattgttggttgtatttttgtaaatgggagttgaaaaattctataatagaatttctgacccttctgttatcccaggttcttgtgctgttttaaacacttcccctccctttcattcccaaactgtcttttctctggggaaaagaatataaattatcctatctaaatttcaaggatgactattcccacatgagagcatatcaaagctgaaaagagaatacagaactcataacaaccagtaccattcacaccagctcatctgctacttcctaataaaactggttgttaatcttccctaatttgtctacatctttcaggtaataaaagtgtctaaaccataatgcattcttccagagaagataatcaggtaacataatacctctcagctcaaagacacagtgcccctttgtatgcagtcttgaattggattgacatttctggctgacacttcacatcaaaggttgttttgctcagttcacaatctgatcttttttattgtcttctagaacattcctaattctcaaaaagatttctgcatcctcagcagtatactgagagcttcttatttcattatctcattaattttattaattgttaagatgtatctaattgtaaatttctcttctcaggaaagtgtcttaagtcccatctttggagatactaataatcagaatattgtgaataccaaaagtatagttaggttggcataactcatctgcgaggggaacagagatctgtcaagtagaaaagatgctcataactgtaatgatttcataggggccattcattacttagtgtattttcttaatatggaatgaatcactgtgagtaaaatatttcattttcttcatttatttagttgagccattcaattcatacagattggaaaacaatttccacgggaagatcaactggtattttgtgacttcatatggatgctacatcctgaagggtatcttcagggtgtctgagcactgaggaatagatatgttttagatgaaactttcatagtgatagagcatttactgagatgtaaacagtcttagagtgcaagtgatcctattatctaaggtgacttcatagaaaatgtagataagattgggaaggtacaggggacttcaaggaaatcgtcaatgaggaaatggacccattgggagggacctgaaaatcatgagttcataccacataactgttcacctttgttctgctttgtagaaacaatatatgaacagatccagatccagattttcttctggatgaagggaagcttacaagaaggaaacaaatagttaacttttcactggcatgcttaccctgtttagtttttaattgctaatagtggatagtgagatgttgttatcctccattgatagagaggattttttaaaaaggcaaaaaagtggaaggcaatgacacctatgttatctcccaatgtatttttgaatgactgtgatccaacttccagtttcaagctgcttaagtccatttcaaaggcaggtccaaatctagtactcacatgtttgggacaattgaagtcagcagggtctgtggcttcccaacctagactttattgtataaagggtaaacagccacttgtaatttagtgagtaagtgcagatctttcatgatgcacataccagcccaactgaaaactggtcaatttctgtgtttcacagtggcattcataaggcctctatggagcattatcccatgcctgagggtcattactcttccacaggggcactgacagttgtgataaatggtgataccttggaagaggagtgtttggatgtttaaacagattacattttccattagatcacatcttagaatgtctactcatgtggacagtgaggatggaatcaggacaaatgacatgtgaactagtgagattcaggtgtaccaatcatcgtttctatgggggaaatattgtgcatcctgtcacaatattatatgtgcttcaaagcaatggatgataaccatatatagctgctgagatgctgggatgtcgacaggcgtgagattctgtccatcactattatctacaacaagactcattacctgccaaccagtaaacatcccatttacaccatctgcaataaattaaaaagtgacgaaaagaatcaagatcagtttgagttgcaacgtgattgtcaagttcattttcatctctagaagccctttacttctctgagagactttagggaaaaatatatgatgaagaaattgaggaatagccttgcagtggcagatctgataattgtcaggtttttaaccagaaatttacaaatacaattagcttcttcaagtataagaaaagtccaggcctttgtcaattccctttgtctgcacttctctgtctctagttttctggtatgctggagctgggaattagtgtttgatactcctaaattgatgctgactacagtgagaaatatttcataaaaatgtatatttcaacataaactatgaggcaaagctgccactgtaaccagagaggaagtgatgattagtttctaatttacacgtgcagtgatttctttggcaagtgtgaattccatgtcctttggtaaggttctttgtagctgttcctacttgaagcagtttgggggatattaaaaagatacagagatctgctgacacttgaggctatttaatttatatgtaagcaaactagctgcctatccagattacacatgtgggtcatctagtggtagaaactgcagagccaaagatcaaatagaagtcttgtgtacaagccacatgagaaatactagaaggatttgacatttattcatatgcatcaccttttatgagaataatttattgttttttgtcttcctttttcttcatcagatattccatcaatgaggaaataacttttattcttaccttagagatgggagttctcagtgttgcccaaggtattgctctgagcaaagagaccaattctgaaatgaggatattgaagataagcccttctgaaaatagcccttgctttgcagttggatttcactcccagaaatccatctctccctgccacaaaatgcccttgtggtagtaacgtgggaagattatatattacctcatctccttacaaagaaaaggacacgtgctatgggaaagctttgtttcttttaatcatttagggcctcccctgccttcaatatttcactgaagtggtccttggtttcctttagaaagacactctagtgagagaggaagaaacagagtaatgaaaatgatgacctcatctggaaagactttctaaccaaaaagaataaagggataagctgtgaccccatccatgaatacgtgaggctgacaaggatagataggtatatgaagttttgactgcttcttcaatactttgcctggaactggtctatatgatattacaatttggcaggagacatcatctctttatcacaagctcatctgtacatttttaaggggaaagatgcaaacctttatgtaggagatttttagggttactgactttaaatgtgctattataaggaagataaatatcacattatgggaatatggaagctattttgcagaacctagcatgggagtgaatgagttttattgttccttcctcttctcatctactcaatcctgaacttgaacactatattaattctactgggacaaagttaattgctgatgggttcacagaattatagaagtatagactttacttctctagaaataaaatctgattatgtttaagtcatttcagtcctgaatggcacattttcaaactacaatagaaggaatgtaccagataagttatactgtaaatttatgatgttcattttaactaatataaactggacctggctaataataagactgagttaggaaagctatagttcatctctatagcatcagaaaaggaaagcccagtatacttgtagtaaatgtacatataatcaaacacaaaatcccaatttttcagatttttcactgattttccaaggaccaaagaaatgcttggaagaggatggtatgaagaggctaagtgttcatggagtggaagttaaattatactttcaattattatattttttctacaaaattgcctaatgtacattgctagaaattggtataaacagagctactatgctcatgaagtattgattaatactttgtgtaccacatcatacatttatatagagtataaaatggtggagttcttaaggtccttatatgtcactaatatccaattgctgtggaagtcttatcatgaagtcttggattggattgcttctcaaatctaaaagcccagttaaacataaggcattgctcccagttgctttcttggcaaaacatcatataactgtctcaagaaataaacgtggatttggagagaaaagggtaaatttgtgaagctatattgaggacacttcttggagtgacccagcatcactagtttagcttggacttattttttgtgcatttatataaaatagaatgattgaaaacaataattctgaaggcaaaaatgtaacacgaagtaacagacaccttcttcacatgtatcacaaatttgaagcttccacctttgtcatgaatgagcaaatagagagagacctggcctttgtgtctagcttcctcttaaaagcctcttaatccaacataagagagttttatatatttttttaacaacaacaaacatgaatcaaattgcctggtatagcagccagtggccacatctgcagcaaagacttttttgtgggagctcccaaagctcataaccatggagtgaaccataattatattgtttagaaatccatgtcagagaaaaagcttttttgactttaaccatttcccattaattttgggcggtttggaaataggccagagaaacattttaccaagtttctgtaacttttctattattttaatggttctaaagcagaactgattagtgaatgactaagggaagtggaaaaaaaaaaaaacaggaagagtcaagtaaaaagctcaaaaaggtgtcactgtccttgattttgtgatctttttgggatagatttcctaatctttgatgttttctctcttcatgaccattccagagaacttcagctagagacaaaataataaggaaatacagttaagctatgtggtagtgaataaatacctggatatctagaatttccaagttttgttttgttttgtttagagacaaggtctcgctccgtcacccaggctggagtgcaatgacaaatcatgactcactgcagcctccaccttctgggctaaatgatcctcccacctcaccccctgagtagctgagattatagacatgagcaaccatgcccaaataatgttttaaaataatattttgtagagaaggagtcttactatgctgtccaggctggtctcacactcctggcctcaagtgatccccccacatgggcttcccagagtgctgggattatagatgtgagccgccactatatttttagctgaagatgagtttccatttatttatagaaataaaagtgttcttaataaaagttctgtgagctttatttctttggaaaccatacctagaagtttacaaacacatctggggtacaattgggacacgtctactctatgtttcacctctactcacatccttgtagtgtttcttataggcaaggaaaatacttcatattgaacatatgataagtggcaactttgctgagactaatttataagaatagaagctgaaatattatccatggtttccaaagaaaagcattttttcctgaatagcccacttccaatctatcattcttcactttgttgcttatgtatatctctatcttcatttccatatatcaaatattacctatcctcaaaggctcatcccaaatgcctctaactttctgaggcccttattgcttacttctctttagctctcccatgcaacgaaagtcattgacttgtatataccacccgcccacaataaatttttgtgcacttcttttgtaaagcttattacttaatttgcataattgtctataaatttgtctaatccctctgctaggtatgaactctttaagtgaaagaactttaatactgtgtcttaggacaggacacagtaggcacacagtaaatatcgttacgcaaattgaatctcttttattgtgaacaggaatttttttccagaattttccatactatttacagaatgatagactgataaatgcatcactatattcaatcgaatatatttttaatcgattaaaaaacaatcgatttaaagacaatcgaaataatttttaatccttgtgagtctacaaaccccccttgtttcagatgctcagtatcctctttaaaaaaatttattttggccagttgtggtggcttatgtgtataattccagcactttgggaggctgagctgggccgatcctttgtggccaggagttcaacacaagcctggccaacatggcaaaaccccgtctctgctaaaaatacaaaaattagatggacatggtggcacatacctgtaatcacagctactcgggacgctgaggcacgagaatcgcttgaacccaggaggcagaggttgcagtgagcagagatcacgccactgcactccagcgtgggtgacagagtgagaccctgtctcaaaaaacaaacaaactatatcttgggatctgtaaaattactcataagttatgagtttttaaaagtagagcaaatccacaaactgaaggaaaataaagagatcaagaatggaaccagaaaataagaaattataactttctttataaaaagtaaatgagaatctttaaagacaaccccccaaaaagcattatttacagagttaaaacaatgcacttattaacttgccatcttcaaggcttccttcataagtgaagaggaaatatcactgaagaattaaaatattgtctggcatcaggcttactcaaagctgttgacaaatcagcttacaatttggacttcagcctatccacagtgaatgtggatcagtttggctagtgcatatactctatgcacatcatcaaccaaactatggaaaaagtgatgtaaatatgactgaccgctgacccaaactgtagtgaggaaatattttaattgcgtaagaaaaatgagatggaatttgataagggaagaaaaaataaataaagaagttatagggtgggcacagtggctcatgcctgtaattccagcactttgggaggccaaggcaggcggatcgcaagatcaggagattgagaccatcctggctaacacggtgaaaccccatctctactaaaaatacaaaaaaattagctaggcatggtggcgggcacctgtagtcccagctgctcaggaggctgaggcaggagaatggcatgaacccaggaggtggagcttgcagtgagctgagatcgcgccactgcactccaacctgggccacagagcaaggctccatctcaaaaaaataaaaaagaagttatatagaagtagaaaaaatattttatggaaggaaaattgaggaaacagaaaagcaaaatattaaaaatcagttagttggggccagttgctcaagcaagtaaaatgtcaggtacaaggtatacctcttaactgatagagtcaccaaaactctattaacagcatcagtcaaaaaaaaaaaaaaaagaaaaaggtcaacttgtaactctgtgaaatcaactctgcccatagctttctagaaaaaaaatccttagtgtgatgattagagaaatgaaaaaagagagaggctcaaaggacagtagtaaactgtttatgtcctaaattggtcatcattagcacttatatagtttggtggaaattgctgtgttaaagccaaatttctgtttacaaaaagaaattgatgctagtagagaatgaattgtactgcatatattcaagatatgaggagtcactgtggtaccagtaatattaccatgttgaaaaaaaattagcagtaaagatatacattgaacatttaacagaattttgctattactttgataatatcttaataaagaacatagaaacatagggctgatagaagaagtgttatatgtaattgtcccactgtactaagtcatatagtacaaaattaacactgaatccatcttaaagaaagtattttatcataaataatatacaagctggcctgcttaagaaaagaactcatttaaagttataagggcaagtgaatgagactatctgaaatgagcacataaaatactctttgattagatatttagtgaaatgtcataaaaggattttgtttcctggaataagaggagcatctgccgttatatagaatagctatagaattgtcatctttcacattttctcagtagccaaaggtcagaaatatatatagtaataccttagtatattaagaggctttcatatgtttgtttacttctttcagtaccttttctctttaaccactgtgaagaagttattttcttattcatggctagttttcttcaatgtaccttttcagttcttaataattatgaaggaatgagcttcctacatccattgtttatgcaacctttgctttatattaatgttaagaaacagtccagtcataggccaagtgtggtggctcacgcatgtaatcccagcactttaggaggctgaggcaggtggatcacttgaggccaggcatttgagaccagcctggccaatatggcgaaaccccgtctctactaaaaatacaaaaattacctgggcatggtgatgcacacctgtaatcacagctacttgggaggctgaggcagaagaatcacttgaacccaagaggcagaggttgcagtgagctgagatcatgcgactgcattccagcctgagcaacacagtgagactctgtctcaaaaagaaaaaaaaaaaaagaaaataaaaagaaaaacaaaagaaatagtgcagttgtgtttttaaaacttgatatccttttggcacacctgtagatgaatgtaattctgagactaatagatctcttaggtctcttcccatccttagacagaagttgcatgagagaaatgagataatgtaaaaggtcagtactgaaggtcaactccctgtaggttttcatcacacctgaattgaggatgaacagagcccacttcagttggatatctacatggtgctttgttcaaaaaaagtgtgagttttcctttctcctgtcacccacaaacaagaaagaatccacaatataactatttgcagttctgataccatggccataaggctaatctgagtgaggcagagaatatgcacatgcacatgtgtctcttacagagaaacacatggccttctatcaggactgatctgggtgcaaatttaaaccaaaagccatcttattcactggcttcatccaaatgcataaccactatttaggaaaaggaagatatccaagtacactaagaaaaattattgatttttaaattgtgtcaaggtggcatatctagcactaatgaaagcactgttatgtcagtggcctaagaattacaaataatagaaaattaatataaaaatgaaaatacactctttaaaaaatgttgcagtaaagtttaaactagtttctgttcagtaatagaacttttttatgttttcttattgtaaaccttgcacaagtcttattgtaaactttacacctagtatgcacttaataaatacttgaaataaagatttcaattgaaagaaaattgtaagctgttatgtaacattagggcaaaggaggtattactcctaaatctgtgtgcctatagtaacacacatgcattcacatgcatacaccccttaatcattgggatgctctaccactgaccagagcatcttctgctctagccaccagttttctttttcaattactgtccataggaccctttcctgaggccccagcactacgatcatttttaaatcttttcttcttttgcccttcattaccattcagtcagtcactaaattctgccagttctcacccagtaatatctcttcattcagcctctttcttttatttattttcaagggctgacactagaccaagtggccccttatctcctttctgaaccgcttgaataggccacccttccttcaaactatcttcacaaaacaatttttttaagcatctaggatacctgctcccacacataattttctatgtctcatttcttggccttggattttatactgctgcttttctacctgaagactagaatccgaattcctcatctagctgtaaggccactctactaccagttatccttcttggcctccttttctttcccaactccaaggtctccatcaacttctgtttccctggaatggaatgaacaagagctttggcttagcattggtaatctttacaaactggttcctcatgcatccccatgcccctgtagttaccccctactctttactgctctgctttctctatgttagccaagttggtgggctttccagttcccatttccatgcctttgtttatgctttctccactctatggtattcttctctctcaccttggaaaatgtatatccattactttcttccaaattctttttttaaccctatttgctctgcttaagtctttgtacactgtgtgtacacacttttgtgttggtctataagtgctgtgcagttttgcctgtataggttttgtttttccctcattcccagcaagaattataaacatcttcagggagtggagggcatctccttaattatgatacagaattctccacgtgcaactttttcagtaaatgtttgctgacttcttcatgccaaaggtgaccactagatattaacaaggcatttgaattctccagtctggattaaaaaaaaaaaaaaaggtgtatgttgcaaaaggaaggactcactgcatatccatatatccataacccactagtccagactagaaccttcagaatgcttgaggaacaggtaaagcactcaggactcctcctgggtgtttgattggaaggtctcagatgtgttctaccatgtaaagaaagtcaaaggacctatgttgcctggccaggcaatagttttcagaggtagtgggccaggtccaccattcggtagaggaagtttgccaaatgttgttataatattcaaatgggtttatccttaaatgagcacatttgataagcatgcccacccaggctgctttctgaagatgtaaatgggcaacaaagcacaagtgtgactctatccgctgccagagactgactggctccaaaaacatctacacccaccgctttccactgtgtaagatgtaccgatttactctagttgtgccagcccaatgtttgagaattatcaatgaatcagtaagggagaaagaccatcaaaatttttcctgtacttatggatctcaaaaattcttcattaaaaataatttttaagctgactgtctcaagtttctgtagggacagctattatgtaaagaaatctccttctgactctattttagcccacctaataaaatctgatggcagcacatggattgcttcagggaaaatagtttcggggttaaaaaaagacttagaattaaactttatatcttgctccaaaaggactctgtctctgagagtatatggaaacgatgtttttggccatgaattaaagaactgttttatgaagatggttcagatctaagatttgaagaggccattactttaactagaagcttgtaatatgtactcataagtaactgtgaagaccccctcctccagcctgatgaagagaaacagactattgagaagtccttggtgtccctactatgggttattaatcataataacattttaactgccctattgctaatctctaccttatattgcaaggtggatattgttatccctaatttacaaatgagaaaattgttgcttaaagtgatcaagtggctcacacaatggtgtaccactagtaagtagctttggtaaacactgatgtctctggtaccaaagccagtgttcttgatcctcgcaccctgatgccttttaactaaattgcacaatacatgtgaaagcattttgcaacctaaaaagtggtatacaaatggtagtttatatgagagacagaaagtcctgggaagggcaatttccagatcaccctgaagaaggaataaagaaagaatgaatactctaaaagtactagcagctcttttagtcatatacagaactccataaatcattcttctctggtatttggaagcattcagagataaaagagttcatattcctttttgactagactacccagaagcatacatatccaaagcgggttttccgtccttcatatacagagatgatgctcatggataatgcccccaggaagaaagaagaggtgtgagcagaattcttatattttcatacatatgtcaacttcatgagccatttcattttagttttctgacagagtttcttcatgataaccacatgaaataggtactcattcttctagatttattgttggagtaaaattagttcctagacatactatcttccatgttttggtattaaataaacactgaatgaatgactcataggatttttgacatagctgagagatactctcacatatttgaaaacctagttttggggccatttgttgtggtgcacacctgtaattccagcactttgggaggccaaggcatgtggattgcttgagctcaggagtttgagaccaccctggccaacatggcaaaaccccatctctacaaaaaaatacaaaaattaggcaggagtgatggcatgtgcctgtagttccagctactcgacaggctgatgtggaaggatcacttgggcccaggaggcagaggctgcagtgacccaagatgatgccactgcactccagcctgggcaacagagtgagaccctgtcaaaaaaaaaaaaagaaagaaagaaaagaaagaaagtgaaagaaaaagaaagaaagaaagaaagaaagaaagaaagaaagaaagaaagaaagaaagaaagaaagaagaaatctagtttttaagagtgctacaggtaattttattggtgttaggttatgtgcctttttatcttaaatagatttgttcttcaaatcattgtatttttattgatttgttttcataatttcatggttggcaattcttggcattttagaaagaaggtaaaaatttgtaaacaaatacttaaatgatttaaataagctattgtttcaaaatttctttaacataattaaacttaaatggtcactgctttatatttaatttatctttatgaccaaatccagtaagtctaactacagctagtctttccttaagggtcacaggagataagaatgttgttctcactgttaaagcagagttgttcactgcctaccacagtgccagagaatagtaggtgctcaatgaatagttgtggaataaatcatctgtactttgtcatttggttttatgtttcctggagtgaaaagggaggcatttaaattaacaatacttacctacttcctgagattttttcatgcttactctcaaaggtaatttttgtatgaaaaatctttgaagaaaaagacttcaaaagttcttgagttaagctattataaaagagaactttttcactactcagaaaatagccaatgcgttcttcatttttatgaccattaaaatcttaactgtttgcttgattttaaaagtataaactgtattgtaataaatatatgccaatgttgttaagaaacttgagaaatataaatctttgagtatggaaagctagagtccttggctcatgctggaaacagccagttttctaatagagtttatattagccaagggttttatagtcaatttactagttgttgttaagaaaggaaagtaccaagaagaaaggcaacttggtgcatatcacagcaagtcggagatgggggctaaggcttgaatcagttgatatagtcctgataactctaagtgataatgcagcttattggtccagctgctcccctctattcagagaaatctcatctacaccattgctttaacatagggagagacaaaaggactcagaaattattggttatacagttagccctcagtatttatgggttctacatttgtagatttaatcaaccacacatcaaaaatatttggaaaaaaaacaataaaaaataacaatataccaaaaaaaagacaaattaaaaataccctataacaaccacttacctagtgtttattgtattagatattataggtaacctaaagatggtgagaagtataagggaaggatgtgcataagttatatgtaaatactgtgccacttcatatgagggacttgagcatctgcaagtcttagtatctgcagtggggtcctggaatcagtccctcgaggataccaagggacagttgtatgtttttctggatattatatgtgtatgagatttttttgctttcagtaattgtgattcatagtttcagtatagatctttccagctttcgtttaaacccatttgttgcatcgtattatagtactcccaggaacaaattttggttgtgaatgtgccaggaacagtgcagtaagttaccagtcttttgaagaaagctattaaagaataggtatttaaacctttggaaaggaatttgactatgttattctgaatggttctgattcacctgaacccttcctgtgtacctcactgccagaggagaaaaaccaagtaggtagaacacatgtatcttttgtgtagcagtctgctagacctcaaatgagattactgttgaaaggaaaaaaacaaatttccttttcattacacaaggtaacttagctgctttcaaatgcaaaaacactttctcccacaacctccattctcccttccccagcccctcctctttaattcctgtctggaatggagtcctcccaaatgaggataatcctgccttagctgtttactcacttggttaccttcctgggctctgcaccgtccacaacaggctttgccattttttatttattcctgccagaatgcacttaggagtttttattatagttatggttgaggtggcactttagctctaagctcttatatttatgatttataactttctctctaaattgcatgttgggctagaatttctcaagcacattttctatttagacacaaatgtttcataaaatttgaagaaaatattgggcatggcagcccaatatccaagaattcatttaactcacctgccttcagagttagctgatgcagctcagtgcatcatgtattaaatgttatctgggcattccatagtaggctataaacaaatacctaacttaatgaaactattgtgaaaaaaataattctaggtatctttcaataaaatgaattttaaattatcattgtttcatatttccaaaatacctgtagacatccagatgatcattaaattatgattactcattctttaatagtaatagttgatctattactataaactccaagagagttttaaagagcatgtgttacatatattacttcactcgttcttcctaataatcctacaagcaggtattcttactctgataataacattcagagaggtttaataatttgatgacagtttcctcagctagtcctattaatagtattaacaggattccagtccctattcacctttgcttgttctgctagatgcacccataaacctaaatattctgagttactctttcaacattaatcccacatgaatatgctttgtcatatgttgaagaaaaggtctgtaggtactatcacagtccacaggttgtttggtttgtttattacataaatgctctttccttctctaggggatggctagtgtgtaatcagaagtgaagattcaaggatttttagaggaaatgggcaaatttgtaaacaggaatatggttatcactcaaatagggcattgtagtttaaaaaagaatcacacttttccagccatattgattatgtaaaactaggtatccacaagttgaatcctgatctgttgtgctttatgttctttcctgggaactctacaacacacacatttaaatgaaacatatattgtagaaaaccattggaggaatgttgtagaaatgacagagagtagcactagaaaccttaattttaaatttcatgacttttgtgcaattagaagctcaaccttaacattgcattaacttagattttttgcatttaatcatagatactgggttaaagctatgggagttaacattttaagcctccattaatggttgtaatcaattttttgtattattttttgctaaaataatcaaaagggcatttaacctggacaagaagtaaatctgggattctagagattaatattaaatctgctaatgtatggtcttactattccctggaagcctaggtaatctgatcctatattcaagagtttacaggtaacaagaatctcaggaaaaagtcctagggttcagtatttctctttaaatcgtcatagtagcattgtttttttagcttctcagtgggatgaattttaagcaaatgcagggtggggatacaaggataaaaggaattgacataaaaactaaaggaattgcttaatttgtaaatttaaccctgtaccatgattcttcattagggatatttgctatactgattcagtgccaagcacagggggcaaatgggacagaaagggcactaactatattgaagatgacactagaaatttggagggctcttaataattaggtacttaagctcacctagagaagtgattagcgtttagaagtggagacatggctacaggaacacagataaattagaagggaacaaaatgtccggttttccatagttcttttaagcaactgtagcctgcactggggataagggaatactgtccatgctgcttacacagcatcccacaagtgccagtctgtttggtaccagtacattggactttggtgttacagatgtagcctaggtatgaggagccctgggtttgtttcatatctctttcactaacaaaccagatactctcaaataaatcactcactctcctgatttttccacctttctgcttatggatgtaatgccttcctctcagataatactaatatttataacataaacttaaaaattatgggttgattttctagtttatgtgcacagaggtgttgataatattctctgatggttgtttgtatttctctggggtcagtggtaatattatcctttgcaaactaacacagcaaccaaagaaaaccacagaaaaccaaataccgcatgttctcacttataagtgggagctaaatgatgagaatacgtggacacatagaggggaacaatacaaactggggcctttcggagcatggagtatgggaggagggagagaatcaggaaaaattactaataggtactaagcttagtacttcattgataaaataatctgtacaacccccatgacacaagtttacctatataacaaacctgcacttacacccctgaacttaaaataaaagttagaaaaaaaaaaaaaaggtgggttgaaagcaatttacaactaagagaagatgaacatttatagcacaagagagacttggcaaaaatgtggtgtgatcttacttgggtctagagatacaaagatggatgaatcatttttctcgagcagctcagagtctaatgagggcagtggggaactggaagggtgggtatagccttagcaaagagataaaaacagaatatgacacgagtgataatagagtggtacagtagaggagatgacgtctggatatttgaaaagcagtaagtatgtaggtgtaagtaaacattactaatgatacgatgcaatggaaagaacactagcacaggagctcattctgtcctcgaggcttaccatgtgtgatccaaagtaatactctgttcctgtgtttctttatctgtaaaatgggtataacaccacattgcttatgtcctaaggtagagaagcaaataagagctgtgtatgtggaagcactttgaaaactttacactgctatacaaatgtctaacattattactattgtatcgccaaaaatagtggagaatcaacataacaaaatgggtgattcagaactaaacttatttcaccaaaaatgtcaaataattatgaaagaagtaaaccgtgagacttaaaatgtatgaatgatgcatctgaataaaattttgttacatgcaattgatatgttctggccaccaactagcagaataattgtgactttccaaaattataatcttctaaagctaggaaagagaaacttaaaattggaaggagcctggacacttatacactaaagatgacaggatgaaaaagaaggaggattgtgcttttccaaatgtcaaaatttaaaacgctaataaaatccaataaacaggatatttaccatggctacaacaactagcaaaggttaacttggacaaggactggaaaccattgaaggtacagagggacaacaatcaatgagaatgccaacccccgatgagttctaatctcattggcatgtgctcaagtcatggagctactcctttcacagactgaatgtgactctaatcattatttttgagattttttaatacacatattatttcataactgtgctttttttgcatagcagaagttacttttgaatcaaagtgagaaaacagttcttaggtgatttaactccaacagtttgaataagatgacagaatgctcagacacaaacaggacctgtctctacacatcttagacagagagcagaatattcaaacatgtgtatcttgcacttaatttaaactgcgtggttggttacctatctctttggcaattcagtataaagttttattactgtgaaatagagtagggtagggatttatgtcacacaaaaatgaatttccatggatgggaacacacatgaaataatttaggtaagcagtatgtcaaatgaaaatttaagatgttagagctggtggtgcaaagggaggaagcaaaagaggaagtttgtgtaatagatgataaatatatcacactggggaaagaaaaaggaccacagatactatataggaagttattactaatgttgaagaattgtggaaaacattgaagagtgatttttagggtgaagaaatcaaagcagccgattagtcgaaaagggagtctcatttcaatgtcaatgaaaaatgtaacacttaaaataaatgtgagcctttattattatacccaggaaggaatagaaaccacaggtctagctagagtttctataggtttagccattagatcttttttttattattattatacttttaagttctgggatatatgtgcagaacatgcaggtttgttacataggtatacacatgccatggtggtttgctgcacgtatcaacctgtcatctacattaggtatttctcctaatgctatccctcccctagccccccagccaccaacaggccccagtgtgtgacattcccctccctatgtccatgtgttcttattgttcaactctcacttatgagtgagaacatgcagtgtttggtttcctgtttctgtgttagtttactgagaacgatggtttccagtttcatgtcctgcaaaggaaatgaactcatccttttttaatggctgcatagtattccatgttgtgtatatgccacattttctttatccagtctatcattgatgggcatttggcttggttccaagtctttaccactgtgaatagtgctgcaataaacatacatgtgcatgtgtctttatagtagaatgatttctaatactttgggtatgtactcagtaatgggatcgctgggtcaaatggtatttttggttctagatccttgatgaattgccacgctgtcttccagaatggttgaactaatttacactcccaccaacagtgtaaaagcgttcctatttctccacatcctctccagcatctgttgtttcctaactttttaatgatcgccattctaactggcgtgagatggtatctcattgtgattttgatttgcatttctctaatgaccagtgatcatgagctttttttcatatgttcgttgaccacataaatgtcttcttttgagaagtgtctgctcttatccttcacccactttttgatggggtttgtttttttcttgtaaatttgtttaaattccttgttgattctggatattagccctttgttagatgaatagattgcaaaaatgttctcccattctgtaggttgcctgttcactctgatgatagtttcttttgctgtgcagaagctctttagtttaattagatcccatttgtcagttttgggttttttgccattgcttttggtgttttagtcatgaagtctttgcccatgactatgtcctgaatggtatcgcctacgttttcttctagggtttttatggtttgaggtcttacatttaggtctttaatccatcttgagttaatttttgtataaggtgtaaggaaggggtccagtttcggttttctgcatagggctagccagttttcccaacaccatttattaaatagggaatcttttccccttttcttgtttttgtcaggtttgtcaaagatcagatggttgtagatgtgtggtgttattttggaggcctctttctgttccattggtctatatatctgttttggtaccagtaccatgccgttttggtaacagtagccttctagcatagtttgaagtcaggtagcgtgatgcctccagctttgttctttaggcttaggattgtcttggctatatgggctcttttttgattccatatgaaatttaaaattgtttttttctaattctgtgaagaaaatcaatggtagcttgatggggatagcattgaatctataaattactttgggcagtatggccattttcacgatattgattcttcctatccatgagcatggaatgtttttccatttgtttgtgtcctctcttatttccttgagcagtggtttgtagttctctttgaagaggtccttcacatcccctgtaagttgtattcctaggtattttattctctttatggcaattatgaatgggagttcactcatgatttggctctctgttattggtgtataggaatacttgtgatttttgcacatggattttgtatcctgagactttgctgaagttgcttatcagcttaaggagattttgagctgagatgatggagttttctgaatacacaatcatgtcatctgcaaacagacaatttgacttcctctcttcctatttgaataccctttatttatttctcttgtctgattgccctggccaaaacttccaatactgtgttaaataggagtggtgagagaaggcatccttgtcttgtgctagttttcagagggaatgcgtccagcatttgcccattcagtatggtattggctgtggatttgtcataaatagcccttattattttgagatacgttccatcaatacctagtttattgagagattttagcataaagcggtgttgaattttatcaaaggccttttctgcatctattgagataatcatgtggcttttgtcattggctctaaactgcttatataatggattacatttattgatttgtgtatgttgaaccatcattgagtcccagggatgaagccaacttgatcgtggtggataagctttttgctgtgctgctggattcggtttgccagtattttatcgaggattttcacatcaatgttcatcagggatattggccttaaattctcctttttttgttgtgactctgccaggttttggtatcaggatgattctggcctcataaaatgagttagggaggagtccctctttttctatgatctggaatagtttcagaaggaatggtaccagctcctctttgtatctctgatagaattcagctgtgaattcgtctggtcctgggctttttttggttggtaggctattaactactgcctcaatttcagaacttgttattggtctattcagggatttgacttcttcctggtttagtcttgggagggtttatgtgaccaggaatttatccatttcttctagattttctagtttatttgcatagaggtgtttatagtattctctgatggtagtttgtatttctgtgggatcagtggtgatatcccctttatcattttttattgtgtctatttgattcttctctcttttcttcttgattagtctggctagcggtctatctgctttgttaatcttttcaaaaaatcagctcctagattcatcaattttttgaagggtttttcatgtctctatctccttcagttctgctctgatcttagttatttcttctcttctgctagcttttgaatttgtgtgctcttgcttctctagctcttttaattgtgatgttagagtgtcaattttagatctttcctgttttctcctgtgggcatttagtgctataaatttccctctaaacattagtttagctgtgtcccagagattctggtacattatgtctttgttctcattggtttcaaagaacttatttatttctgccttaattttgttgtttacccagtagtcattcaggagcaggttgttcagtttccatgtggttgtgtggttttgagtgagtttcttaatcttgagttctaatttgattgcactgtggtctgagagactgtttgttatgatttccattcttttacatttgctgaggagtgatttgcttccaattatgcggtcagttttagagtaagtgtgatatggtgctgagaagaaagtatattctgttaatttggggtggagagttctgtagatgtctatttggtccacttgttcccagggctgagttcaagtcctgaatatccttgttaattttctgtctcattgatctgtctaatattgacagtgggctgttagagtctcccactattattgtgtgggagtcaaagtctctttgtaggtctctaagaactcgctttatgaatctgggtgctcgtgtattaggtgcatgtatatttaggacagttagctcttcttgttgcattgatccctttaccattacgtaatgcccttcattgtcttttttgatctttattggtttaaaatctgttttatcagagactaggattgcaacccctgcatttttttttgctttccatttgcttggtaaatattcctccattcctttattttgagcctatgtgtgtctttgtacgtgagatgggtctcctaaatgcagcacactgatgggtcttgactctatccaattttccagtctgtgtcttttaattggggcatttagcccatttacatttaagattaacactgttatgtgtgaatctgatcctgtcattatgatgctagctggtaatgttgcccattagttgatgcagtttcttcatagtgtcgatggtctttacaatttggtgtgtttttgcagtggctggtaccggtttttcctttccatatttagtgctttcttcaggagctgttgtaaggcaggcctagtggtgacaaaatctctcagcattttcttgtccatcaaggattttaattctcctttgcttttgaagcttagtttggctggatatgaaattctgggttgaaaattcttttctttaagaatgttgaatattggcccccactctcttctggcctgtagggtttctgcagagagatctgttgttagtctgatggacttccctttgtgggtaacctgacctttctctctggctgcccttaacattttttccttcatttcaatcttggtgaatctgacgattatgtgtcttggggttgctcttcttgaggaacatctttgtggtgttctctgtatttcctgaatttgaatgttggcctgtcttgctaggctggggaagctctcctggataatatcctgaagaattttccaacttggttccattctccctatcactttcaggtacaccaatgaaacgtaggtttggtcttttcacatagtcccatatttcttggaggtttgttcattccttttcattcttttttctctaaccttgtcttcatgctttatttcattaagttgatcttcatctctgatatcctttcttctgcttgattgattcagctattggtacttgcgtatgcttcatgaacttctcgtgctatgtttttcagttccagcaggtaatttatgttcttctctaaactggttattctagttagcaattcttctaaccttttttcaagcttcttagctcccttgcattgggttagaacatgctcctttagctcagaggagttcgttattacccaccttctgaagcctacttctgtcaattcctcaaactcattctccatccagttttgttcccttgctggtgaggagttgtgattttttggaggagaaacgacattcgggtttttggaatttcagcctttttaagctggtttttcctcatctttgtggatttatctacctttggtctttgacgctggtgatcttcggatggggtttttgtgtggacatcttttttgttaatgttgatgctattcctttctgtttgttagttttccttctaacagtctggcatctctgctgcaggtctgctggagtttgctggacatccactccagaccctgtttgcctgggtaccaccagcagaggctacagaacagcaaacaatgctaccggttccttcctctggaagcttcatcccagaggggcacccaccagatgccacccagagctctcctgtatgagctgtctattgacccctgctgggaggtgtctcccagtgaggaggcatgggggtcagggacccacttgaggaggcaatctgtcccttaggagagctcgagctctgtgatgggagatctgctgctctcttcagagctggcaggtgggaacgtttaagtctgctgaaactgcgcccacagctgccccttcccccaggtgctctgtcccagggagatgggagttttatctataagcacctgactggggctgctaactttctttcagagatgccctgctcagagaggagaaatctagagaggcagtctttctacagtggctttgccgaactgtggtgggctccacccagtttgaacttcctggtggctttgttttcactgtgaggggaaaaccacctacttaagcctcagtaatggtggacacccctccccccaccaagcttgagggtcccaggtcaacttcagactgccgtgctggcagcaaggatttcaagccagtggatcttagcttgcttggctccatgggggtgggatccactgagctagaccacttggctccctggcttcagcccccattccagggtagtgagtggttctgtctcactggcattgcaggtgccactggggtatgaaaaataattcctgcagctagctcagtgtctgcccaaacggccgcccagttttgtcttgaaacccagggccctcgtggtgtaggcacccaagggaatctcctggtctgcaggttgtgaagacggtgagaaaagcatagtatctgggctggaatacaccgaacctcatggcacagtccctcgcggctttctcggctaacggagggaattccccaaccctgtgtgcttcctgggtgaagcgatgccccaccctgctttggcttgccctctgtgggctgcacccactgtctaaccagtcccaatgagaagagccaggtacctctgttggaaatgcagaaatcacctgccttctggattgatcttgctgggagctgcagacgggagctgttcctattcggccatcttgccagccagggtcattttttaaacttttcttttgcagaggttaccaaaggaccagcagcaagcaaaacttctctcccctccccaaaaatctttctttccattgattctattttgtttcaatccagtcctgattgtgagaaagctccctctcaggacagctctcctggttctcttcaggctgataatggaactctggtatgatggaagggtatgaaagtctttttctaaatgctgtatgtcttgccttttttgtatatttgtgtaaagaaattcatagtagtaattctctgacactgagttaaaagaagtcttatttttaatctgtcttcacttatctagtcctcaaacttaggctaaaatctcaaatggactataaaagcactacaggatttagaacttaattagataatttagataagggacaagaaagaaagaaaaggagagtttaatgtttctaaattgatgtcatctaccaagagctggaacacaggaggaagaaggtttgacttgaaagggcaaggagtgcttttggtttgggacttgaatttaaggtggcacaaaatatttagattttcttaaaatgcccaggatactataggcaatacaggttttgaagctccgaagaaaggtctgggctaaagatcaagagtcgggagttatttgtgaggaagtagtaggtaaagccataagactagataagatgactcaaggaaaaattatgagagaaagaaaaactcagagcagaacactaggaaattctaatacttaaagaatagatgagaaagaggagccaaacaaaagaggagagaaaactagagatagagaatagggaaattaggccagtattattaaggaaaccagggatgaagtatttcagggaggggcagtgatgagaattaaaaaataaaactgaaaatgtccaataaacttgactcaaaagaggtcagccatgacactgagagtaaagtatcaaaagggcgatgatcattttgagacagtagttaatacctgtaatttcataggtggtaatgatgttaaaaaccctatgtaactaaaagcacttcttttaaattacctagttcttagatttctcaagttagctcttcacttgtccctccctttagtattattttaacttttcaaaatgtagtcacacattgctcaacaaagggaatacattctgagaaatgcatcattaggcaatttcatcgttgtgtgaacaatatagagtgtacttacacaaacctagatgatagagcttactacacacctaggctatatgatatagcctattgcttttaggcttcaaacctgcacagcatgttactgtactggatactgtaagtaattataacagaatggtaagttttcatgtatctaaacatatctaaacattgaaaaggtacagtacaaacacagcataaaagatcaaaagtgtatgcctttatagggcacttacaatgaatggatcttgcagaactagaagttactctgggtgagtgaatgagtgagtgatgagtgaatgtgaacacctaggacattactgtatactcctgtagactttataagcactgtacatttaggctacactaaatttatgttttaaaaagtaattgtgctgtgatgttatgatcactatgacatcactaggcattaggaatttttcagttatcttataatcttgcaggaccacagtcagatatgtggtccattgtagactaaaatgtcattatacagcacataattgtgttttcacataattgtgaaaaaaaataggacttcctttaactcagtgtcagagaattactactacgaatttctttacacaaatatataaaaaaggcaagccatacagcatttagaaaaagactttacactttatttggaaaacatgtttattggggatgcagtacacaaaatatattaaaaggctgtggttgtcacaatacatttccacaccaacaaaaccccaacccatcatccctaccttctacctaaatattataggataaaacacaaagctagaatttttaaaaatcaaactgcttttactaccttctgtaacttctgtactttccaaaccagctatgttctattctgaattcattcaactaactagagttctgtgggtacactagtgaaacaaatgtactatcctcaaggagcttacatatcagtaaataaattattaaaggtggaaaatgtggtaaaagagacataatgtctcggagagagaacaaatttctgctttaggagtgttcttagttaaggtaacattagcttctataatacgcacactcccaaatctcagtatttcaacatgagtttctctcttgctcatgtaaagactggtcagggacccaggttgacagaggctcttcagtacatagcttccaagattgctgtgggtgtgacatccagccagaaatctggtgaagagagagcaatgattacacaggaacttttaatggaccaggcctgggacagcgtatgtcacttccaccaacatcccactcaccagaatttggtcacagggccatagctatctgcagagaaggctgggaaatggaacttagctatgtgctcaagaggaaaagtaaaacagttattgaataattagtaataattagcaagtaactacctaggggtcacagaggacctctcaggtagaatttagacttaaagatgatgggggagtgtgtggaagagtggtgcagaatagggaaaggggggattgaaggaagaacaagctctagcttcacctgcatgggtagagcccacagtgttggtagggacatgttagctttcaacatcagcttcttaacagtattattctttcatcggaggaaattagtctatttctgaggaaaaaaaaatctgcaatacgtagcaatttacttacttggatattgaatgttaaagcagagagagactttgtcctcaaaaccctcccatttcagaagtgaggagcctggggaggtcatgctctctggatgtcacacagtgagtcactgtcaaagccagaatagaacccagacctctcagtttcccattccagtgctctttctatgaggaaagtataagtttgagcatttttaaaccttaaatatgtagaaataaccatgatattttatcgtaaattatttcagtcatctcattttaaattttactccaaactaaaggaaaacggtactgatttaaaacatctatcataattcaatatagcccatatttcttctttaggaaaaatttttttttgttttttatcctgaagacccgtgccctcttcctgtgtctcatgtagacatttcacagtccaaatatacagagcaagaatagatgaaatcaacatgtttaccattattctatctaaattttcaaagaaaaagggaacaaaaggtgagtgatgactgagttgcatggctataattgagtttttgttgcttttatttttataatattttaattgacatagatgcttaaatgtatatcaaaatgcatgtcacagctcttgtacaaagataaatttgactctagagcacattttctttagtgagaatgataaattatctcagagcttgtgattctctacttttaaaaatcataaggtcagttctttaattaaaagataaagaaaagtaggcattgtccatgtagtgaaatcacttttatcaggataatctagtaaccaaaaaaaaaaaaaaattatgaagggaaagacacaatctatcttcagaataattggtccaagaatgacttttttatagtctcataagacccacatctagaagtctcccatcctagtaaaagaaaatgaaaactctactgtgtacaacaaataatttgttctaaatttactcatttcatttttaatcataggccttagttattttatcctattaaataataagtctcttatatatcaacattctctttttcaaaacaattaacatgaatatatggtcagcctccagtataggaaatacacatatttaacatgaagttgcaattactggtaaatatatgttgttaaatacagtacagctgtatgttcccttaccctagcctgacagcctccttcatttgtttccatggaggcagattagacaactaccttttacactcctgagattatggctcagtattgcacagaccattagataatggaatacagctgaacatatataaaaaccagctccaagaatgtctgtggacagaagtccaaaggggtagcagtatctggatgtgtgagtatgtgatgacaatactctacaaacctagataccaaagggcttcctgcccccttcagccctgtgaaataacatggatattgtcttacccacctgatattttagcaaactgccaaggcttattgatgaaccaacactggattgagtgccagaaacattctgctccctaagatttgccctcctgtgagactcccatcagatttttggacctgccatctagtggccactgcagtaacaagacaatcattacattttggccttcttttattttttaaatttttattttttttaaagttaaatgtggctcatctgcagctaaatatggaggtgctccacccattaaactatagttcccacctccctggttagatatgctgccgttttcatagagcagcttcaatcagaccatttgttatgttcaaagaaaaacagatttttcacgcaaaatgatacacttcccacctggatttgaaaaaagaaagtaagtcttcttccattattgaaaaaagatctggaggaggggagaagggggagctggagagcaggcatatattctgtcaagtagttctacttgtgagactaattcttccaaactgtgcacccaacagagtaaacctcttattttgctgcttttgcactgatcccccacatagctgtaatgttctagttgttttccctgtcctataaaccacgtagacatttgctattatacataatgttggcaaaggaacaatttacaaatgacttaagcaggtaattatttgttagaatataggtctatggaagtatatattactgtagcaaaacctggtaaaaggttagttttgtttctgtgtttctattataatccctggttgttagtttttctttttccagggatttatgagtggaatgtaaaaatgcacagtgggctattattattatttattatttatcaaaggaacatgaatatacagagcaaaggccagtttgtgaactatgccagacagttccccgtccaaaagacctcaaaatacaactctgaagcaggtcctaaaaaatgcaggacagaatgaaagcagatgggtgaatgatacttattcaatatcttaaatatagaactcactagtgcaggtgcatcttcagatgttatttgaaagaagagacagaatatcttggcattgtgtcatttattcataaatattataaattttatattatttgagaaaatattctaaatatgcaaggtagtttaaaagaaggtgtgaaagctgattccttcaaatgagacaaagggcaaatcgagtgactgaacataagaaagtggagaagaaccaggccaaggatggagccaaggaaaaacaaatcccacaggaacacttaaagtttgatggaaaaaatgcagggatttaaaaaaataaagattccaaacaatcaaggaggatgatgatcttggcagctatgccttgaatatactaaaattgccaagagaatccaggaacaataatggcaatgacaatgatttagctgtgggaattgcagtgcaagagtgtagaattctgtgtagtggacataggggttggttctggtctcaaagacagtatcatagagcaggaagaatagttagatttagctaacagcagggtaaaaggtagaaaatgtttgttgaggaagatggaagtctatgaagctatctaaggaggccatagtattttttgaatacccgttatctgccctacactgtgttagtttttactgagtatactgtagttgtaagtcaggatccttaggccaaaaataaacctattttaaagtgaaaaggtaagaataacccatatgaaacaattagaaaatataaagcagctggtgttgttagggatagcaggattttagaggagggagaaatcagcaggcctcatggtaatcatagaaaaaccatccgagaagtaagacctaagctgggactcaaagaattggtatgtggggaatagacataaacaagggagaaatatgatgaaatcatctgaatagaaatgaacatggtgttttgggggagtagtgaaatgactttactcggtgaaatggatggtttgagcaggaaaggagggagaagctggtaggatagtaaagcaaagctgttgtgtgaacccaagaatataaggattcatcagcatgttatagggggcatttattaattcatcctgaaagtatttattgagggcatattatgttccaggcacaaattaaacaaaacttttccccttatgaaatttatatttaatgaaggaaaatagacaccccccccaacaaaaaaagcaaacaaataaatgaacaagttaagtttagagagcgattagtgccatgaagaacattaatctgagtgataaaatagagagtgacaggctagagtagtgatggtcccaaagggggagagtagagagtattcaaaattggaggccaggcacagtggctcatgcctgtaatcccaacattttgggaggccaaggcaggtggattgtttgaggtcaggagttcgagaccagcctggccaacatagtgaaacctcgtctctactaaaatacaaaaattagccgggtgtggtggtgcgtgcctgtaatctcagctactcaagagaccgcggcaggggaatcgcttgaacctgagaggcggaagttgtagtgagctgagatggcatgactgtgcactccagcctgggcaacagagtgagactccatctcagaaaaaaaaattggaaattctcaagacttggagataatttggatagggaggagaaagggtagacacaggtgatatgtagctatctagtctaggaaattaaagtttgtaatgccagtatataagctggaaagatggaaagtgagagagaggaaacattgaggaggtagtagaaaagctaagtgttcccataactcccccttgatgcagttgtctaccaggcaagtttcccaattccttgaaaacgttagcccctagctcactaacactctttccatttctaccccattacaattattggttattcactgtgtaaatacacgctccctctaatacctcctctcaatttcttgaacttctcatgattgattctccactctgccatagctactcattcccatggctacatttctgatgttttaattactaataattacaatattccacaatctcaatttcaagcattccattttccaaccacagcctaatgtcttggtagttcaatccctttgttacccctaatacaccaattccttaaacccactaggacccctaattcattgattttacccatagcttctcatatgctcacttcattatatagcgtagattccatggacaatgattttaatcatttccttgtatgcgcctttaacaccattgaccttctctgacttaactgtgctctcttgacaaatctcaactatactgatcatatgcaactcgccatctatttcatgcctgtgtgccagctgaatgtggctggagaaaaacacacaagcaaatgtatgactctcagtttaaattcatgatccctcaaggaggccgttaatgctgcccagcaaatataatatgtttccttgtcatttactcttccatatctgtacaagaatatttcatatttttccctctctcaaatttctaacacctcctcccccatccttacgctcaacttagaacctttctttttacttcactgaaaaaatagaaaccatcaaaagacaacttcacaaatacttgctgtccagcacacctaccctcccatatttatctgtacccatgtattttgccttctctcctgcaactatggataaactctgtgtacccttggctcagcccatccctcattgtgccttagaatctctctcctcttgcacatgcataaacagtgctcctgaaaaagctcacatctttcttctgttttatcaaattttctctttctatcaaaactttcctatcagtatacaaacacataatttatctcatcctaaaaatacccttataaaccatactccctagcagctcctgtcccatttctttgatttccattacagcaaaacttctcaagaaatgcgtatagtcactataaacactctccaatcctatgctctggttctcttttgcccctctagttagcttttgcacctaccagtctagtaaaactgttgatgctaaggtcaccaatgacttccatgttgctaaatccattaaccattcggcagtctttgtctttcctgatgtctcagaattgttttacatggcccattattcattctccattaaaacactttcttcgcttggcgttcagtccaccacactctcctgatttttttcctgcctcacagtctactcctcctcagtctcttttgctagcatattctcatttcccaagcaggtaaacattagagggccctagagctcaatctttgaagctcttctcttcagctccattcactctcttaatatttgcacccaagcttatggtgcaagcttgtatctctagtccaggcctttacacagaattctaggctcacatattcagctgcctattcaacatctccacgtctgtctaatgagcatctcaaacttgacataccagaaatggaattccttattttaccaagcaaatacatagcctccccaatattggtaaataacgctccacctttagggttactcaaatcaaaaatttatttctctcccagacctgtatttctctcacaaacccaaccattgaacaaatcctgcagctctaccttcagaataagtccagaatcttaccactcctcatcctcatcaccactactaccctaatccaagcaactatcatttcttacccggattattgcagtagcctcctaattgtcttccctgcttctggccttaccacttacagtctattctcaaaatgatagccagagtgatgctttgcaatatatgtaatgtaatttcagtcagaccacatcacttctctgctcagaactctctaatggctcaacatctcacttggaagaaaagcctttgcagtagttcacaagaccctccatattcaatttccccattacctctctgtcttcatttagcgctccaccctagctcactcccctcaaccttcattgacccccttcctaacctccagcctaccatgcatgatttcacatttgcacttgcttttctgaccgccttaaatgttttccccagataaggcttgtttgcttatcatcttcaggtctttgctcaattttcacttctaagtaaggcctttcataaccactgtatttaacatttagctttccaccccttttggttcatagcacctactgccttcagacaaaatatatattttatttacacatttatttcctcttgccatggaatataagccccatgattgtgaggtttttttcggttttgtttgtttgttttttgcctgttctatgctctaagaaatcctcagtgcctagtacagagcctggcacatagagagtgttcagtaaatattcgttgtatgaattgaaggaagtaataactgattctttccctgggtttggaggtgttttattaaatgcaaaacataatattgtggcataggctccatgattctccatggcaaaattttcttattcttcaaaattaattttgaaagtaagagtgctttatgcaggcttatccagaatcttagataggccactatttctgttcagcacccaaagcagcaacatccaaagcatttattaacttttttttcattcagtaaatgtttatcagggaatatgggtgttctagacacaggtggtgacatgtgcaaagactcagaaacttaagaaaatatagtacaatgtactgtcgcaatattacaagtgacagataatgatgctctgagctaatgtggtgcaatggggatgagagaggtagaaatgtgaaaaacgttatgaagtgaaagggcactagattcaagaaacctggttagtggagacacaaaatattgtctacctttatcaggctataaagtggaaagtgattataaaagagttagataagaatgaaacttaaacatagaggacctggattgtaaattttcctttgtagggtatagacgtaaaatttctcattttcagagtgactataaaaacattcagtgtgtctactggtgaccttggcaaaatcatttgaaaggtgttcccagatcagaccctaactctcattcttttaacattctgactgacagttgaaatagtttgaggtcccaaatttttttgtctagtaatctcacccttcctgaaagtaatttttcttattttatgcaaaaattgctatattaagacatagaaaaatatatgtgtgtttttaacaggtaaaggtgtaaagaaaactaggcttttaaaatttgtaagtttaataaattaatattagttcaaaacccaattaactgtaaatattgctttctattcaaaaaaggcctcctttggttattaggattgcacatctatatgcacgggtgattatttgaaggtgagataaaagcaaccatgattcttcctaggtatggaactttggcagatgggtgaatggtaatactattaatatttactcacatagggaacataggaggaagagaaagtttgaaggaaaagatgagttcagctttgacatgttgaatttaggatgcttttggaatatctaattgtaattgtctagtaattcatttgatataaagggttagaggtcaagagataagtaatggctcaagatacagatttgaaaggtatttaaaaacagggagatatgaatgtccagtaggcaatggacatattagtctgaaatatgtttaataaagcattacaagatacagacctgaatatcaaggaacttacaaacacttatgtgatattttcctagactgattttctcttaaatccactcccactcatccctcaaaccaacacacatcctatccccagctttcatttaaaatgcctacgatttaccctttacattgcaggtataccttgatttctgtagtaattgtatacctcaaaatctcatgccgaacaaaattatgtacatgagatcacgtagtcagttgactcattactctaagaaactatggaatgagtcaatttgcattgttaatgacgtccccctatttatcaccccctttaagtgtttttgtctgatttttgtgtggggggtacatcatattcaactgatataatgtcaaattattgagatatttaaagagactcctgttaaacagtgagagagaagtcatctttattctttctatttccatctttattctttttttctttttctttttcatagggaaggaagcagaggtactcagaatttaaataattccccaaaggtcagcctacatttaaagttaaatgtaactttaaattttattgctctctgagattcttttttttttctagcattgaatcatttttaaatgttttcttgccatttcccttttgtcacccctataacctcagtaggtttacttgtttacctttttattctagaatatcttgtgtctgttctgtctgacaatacttgaaattttcctgacaggcagccattgagtgaacagtttatgtagttttatagcagtagttgtaatctctgctgtcccagttttctagaatgtatggttgtttgggacttctctgtgctctgcccctttattggcagtctcactttctttctcgtgtcttacctttatctctccagaaaagcttctgcaaaatgtatctttcccaccaatcacaatgctgcagtcttagtgtatgcagtctctatggtaactgggaaacatgccacaacaccaagattactagagcaaccatcagagtggggaaatcagcgcatgccctcctctggcacgacagaagtttccccattgaaactggaatcagatacctgtattttaatatgcagggcaaggagggtggcagaggaaatgctataagcccagtctctctaaaggcacattactggggtttgatggaattcttgaagttgatcttatttatcatgaataaagctagagtcatgtactgatcctgagcagacatggataaactggttgaacttgaggagatttttttttcctgcagatacatgactagtttgtaaacaagagaattttactaaattagtatatatgcttaggtaagctcagggaaattaccaatgtactgtaaaaattatttacttgcattgtagagacagactttttcagatgatttccctagcaattgcattgttgacccagggaggacaaaaggcaaaattggctctctctgagcctgccttagagtgggggcagttctattaggtcttgaagggaatgaggatgaagcaatgaggcttttctggggtgcttcctttaggactgaacttcattccaaatatgcagaggatctgactcccaggtacagcccaatagaaacaaagggcataaatcagagtttcataactttggccctattaacctttggggccagataaatctctgtggaacagggctgtcctgtgcactgtaagatgtttagcagcgtccctggcatctaccctctaaatgccagtaggaacttctctaactgtgacaacaaaaaatacagatatcccctgactgggggcaaaaattagccccaggttgagaaccactggcctaaagcaagatgcagcttgggtaagaaaagagagttggagaatcccttaaagggcccagaatattcactagttgatcattcagcaggtatttattgagcccctgttatctttcaggcactcttctacttaccagggataccactgtgaagagtcatgatcttgtggagcttaccttctagtacatgcatgccacatgttcctaactagcaggttccccttccctccacacagcataacagcaaatgcttcaagccaactgagggccaagaaaagaaaaacacaagttcatatttgaagattcttttttcagtttatgaacctcaaaacggctttgatttaaaaatgaaacttggcaagtgattagttcatatgttttagtttataatatgttttaatcattttgggtgttttcaaaacaaatggtgagattaggggttttttttctcttctatttttggcccctttcctctggagagtccttctcttgtgtttagttcttggtgttcttagtatatttgaagaatgcttttaagtatttgaaatgtgtgtacatggttgaaaggggatgaggaagaagaaaccgaaaacttcatgaccctgctcaaaccaatacccataccccagccctaaagcagtgtccgggcaccacatcttcaaggaaggccccttggaaacccctcatgggccagtcctctgacccaggtgatctcctaaccccctttatgtattcttatgaggatatatgataaagaacggactgtgagatttgttgttcaaatttttccccttagaatgtgagctcagtgggtaatagtaccatgttggctctgtccacagttctactatcttcagcatagggcctggtatacagtaagcgcttaaaaaatacatgtcaaatggctgggtgcagtggctcacacctgtaatcctagcactttgggaggccgaggcgggtggatcatgaggtcaggaattcaagaccaacctggccaagatggtgaaatcccatctctactaaaaatacaaaaattagccgggcatggtagcaggtgcctgtaatcccagctactagggaggctgaggcagagaattgcttgaacccgggaggcagagggtgcagtgagccgagatcgtgtcacagcacttcagcctgggcaacagagagaaatttggtcaaaaaaaaaaaaaagaaatatgtgttgattgactgacgaactgactaagaaacctagcttttgggatgtccttcccaaacactttaagcctgcacactgcctgtggtttaacgtgcctctagtatgagacctcattgtcttccttattactttgtaaactgtgaagtaacatgttcgctatctagttccaagctttgttcagtgatttagaggataaatgcctatgactctcagtgtcagaaacagagtaaaattacatatcttatttacttattttcttgtttaatatatgttccctctactggaatttaaactatacaaggtggagaacttgatctgccaataatgttatcctctgtgcctagaacgatgtctgacacataggagatactcaacaaatgtttgctgataaaataaatgataggcatttcatctattaatatattgattgatagattgattacttattagtgaacaaaaaatgcagtaacgtgatgaagttcttagtcattcattcaatatcctagagcagttcctagcacatagtaggcactcagtaagtacctgatgagtgaaagaactgattccaatatactgaagattttttcttttactgagtatatcagttttctggggctttgtaacgaactaccacaaactgagtggcttaaacaacagaaattttttgtctcacagttatagaagctagatgttcaagattaaagtatcaacagggtcggctccttctaaggctgtgagttccgtgactcccacccagcttctggtggtttcctggcaatctttggtgttccttggcttatagaagcatcagccccaatctctgccgtcatcgtcacatgatgttctccctgtgtgcatgtctgtgtttaagtttctcttttttataagtacactagtcatattggattgcaggcccactctacagcatgacctcatcttaatcacatcttcaatgaccctattcacacatctattcatattctaaagaattgggggccagaatgtcaacatatgaattttaagggaacataatcaacccataatactaaaataatagagatcttcaggtagtagcattttgatggatgacttctatttggaaaacctcagcttctcaaaataacgtatagatttatgattctatatggaaattgatgtggtaatattaaatagcatttactgtgttataccaagacatatatgtttatagagaggaaacataaagaaagtacaaggggcatgaatgtacatggcatatatccttgaatgctgagtagtgtggtgtcaccagacaatgggttatgtggggaagactgctgagaggtgccaaagggatttgtatatgaagcaaagcggcttgggggttgggcttcattttacaggcctccaacatataaggcaaaacttattgaatggtaaatgagtatagcaaggatgaattttattgtatgtaaattatacctcagtgaacctgacctttaaaagaaagaaaacaatgaggttgaagaatggattttggaagctaacaattcagaagtgtttggtgactttggcaaaaaaaaaaaaaaaaattgtttaattagaaacacagctagagaaaccagattgtaatggtttgaggaataaacgggagcttaggaagcttgaaggtggcacaaaagagggaaagataaagtctgcaaaagatggtttgttgtttgttagtttattatcattgttattgttgttaccttaaatgaagacagctaaagcatgttggcaggcagtaggaaaattgaaaatacaaaagaaaggaaaagtaactgatataataagatcctggatgaggttatcagtgctaggcagaaagatctctgaaatgttacaggcggattcattggtggcaaaggtggagtgataggaagtgccatttgatggcctctgttttctctatgcaaaaggaggcaaggttactagctgagagtgaagggtaggggatgggttataaccagttaaatagagtaatgaatgaaactgtggagtgaaaaaggaaactgactaggagcaaattttaaaattgcaaactaattctgaaattcgaacttatgctggaaaccgtaattctgcaggagcatcaagctgtacagttttgtgctttttctccagcaaggatcagcagcctggaagctgaggagaacatacatgtgggttcatctgagctccagaactaggtaaatacagttgagaactgtagatgagggaattgatggagctggtgggtatctctaaagttaacaaccatgggcgtccagactggtagagaagaaactggaaaataatagtctgggagaaaagaggaaaaaacaagaaaaccaaaaagtcagggtgagaaagtagagtacttgttttctggagccatatgtgtccccgtaaggagcccggccttacaaaacaagtcttatgcgacaggtctcagagaaaatgcagaaagtagaatgaacacattacagggcatagactggattcaagaacatagcctggtggtcagtgtttcattcctaacttgccactaatttaaggcagctgtcattaccaccattatcacagaatgctaatccttaggaaaagaatgtaagagtagaagaaatacctgtgcatgtaagagcagaataaataggaacctcccatgggtcaatggcaataaacttgacaagaagcaaattgttttattttttgccttggattccaaaagtgtgctgaggtttccctctaggcatgctcttttacttttcttaagattatcgatttattctgttagagagtctacagaggtgacactcttcttttctggccctcgctctccctttctttgttttctctttctcctcatttcctcctatcttaatggattgaatgttgtcatatgtctcagcaaccctccccaacccagtgaccaaataaagtattccccattacttactattggattttgtttaatccccaagaagactgggctaagaagttagtgcttgtttagaaaacacttttaggtactttgcagataacactgtaccactaatccctcatgccctatacatttagatgaacctgggtgtctctctctggtattcgtaagaaaagctctgctcctatgggccctgtctccatatgtcagcctagcaaagtaaccaaccatgttatgcactgtgagataccatcctctagttatcctttacttgcttgagtggactgagatgaacataatatacaaggtttagtagttcctaaaccctatgagaattcctaagctccttctcttgatgttgtcaatatataagttcaaaaaatagctttgggggaatttcaataaacaactctaaataagtcctctttcctttgcaaatataaatcctttgttaaattttatttttttccttttgttttctactcctgattctgttatagctctagcaatgctaaaaacaagctggtttggagattaatatgaccagacataccatgaattttttaaatctcaaaagtcccagtttatccttcttggtaaatcgaatatctgttatatatacatacatatacacatacataaacacatacatacatacatacatatttatgcagtatgttattatgtcttctctaaattcttttttttttttgtctccctgtctcctagaattcttcctaaatgcttttttttgttataataaagaggtaggagaaagaaaacctgaagaaatggaggagaaaagagtatgaagtgctagaagatggaaggagaaggcacactatggaataagggaaaccagtgaggagattgaaaaagtagtgattttcttttcccgagttcccttagactgcttttaggtttggttttgatatttctctcacctagtgccccaaaatgacctctccctagcaatttgttccataaaaaatattcctcttactgccagaaaatatctcttacctgtcaagcaggttgaaatatcctgccccagcatctaaacatcctctccagcctgccaagcccctaaccacctgacccaggggacttggacccattgccattagttctacacaccccctaccccatgccagcatggagagtgttaatggctgatgtaagtgtgaaagaacataagcgataatttggttttactttattaaaattcaaaatataaataggtaaactacatgttgaattcataaaattcttcctccactgtttagaaatacaaaaactgcatttttagaaaagggattgattggtgtcatgtacgtatttgttcacgtctgttgatgcaagataataagagtattaacatagaggtggaataatggtatttataatttcatcaccactgtttatataagataaaaatgtctgaaagcaacagagagaacatttgctgctctatacatacattaaattctcccatttttgtttataaagcatatgaggaggaaaaacaagtttaacaaattgaggaagagttagtgttctttttaccatgtccactgtcatttacctaaggtagccaggttcagaaaataccaaaatatagtggagagggtaactccttataagagaatatagggaccagaaatatgcacttggttaactgttctctgagattgagattacttgagctagattatggtcctctgttcaatgcagaaattgttctaccccagagagtagtgagtactacgtctgggagaccagtaacttgtgtgtaatttgcctgtaacttgagatatgtatcttaggggctgaggctccattccctctttcaaaaaagaaaggaaaaaaatggtgcttcagatcagattgtaaggactcatttcaaaaacttaaataattctgggtagacttttatattttcatggctgtttgagaaagaaaagttagttgggagtggagaaggggtttctcatttatataaaaattagctgtgttgatagtatagctcacaaaggatcaggtcattcatgaaaggttaatggatgttacagggcaaatgaataaaaacaaataaagaacaagaagaggaatcatcatggcaggtggttatatttataacttgtctaaagtgggctaataacctgtcagtgataatagagacagaaactctccaaaacatacattagagtggaaggtccttgagggcagaagtagaatccagttggcagagtaatcaataatagactcgggaaaactatttgttgaattaatgaatgaatgcatggtgttggaaatactttgtatattctcccctatcttaaccaactctcaagataagttcagaaactttattaggctgtcatgaaagagttgatatttaacaaggacataaagcaactaatttttattaattagttccttttagtccccattcatattcctatccctgtctattttattgtctgttggaccaattttgcatgaaaatgttaggagatgaagtcagagaaatagtaagggacatactgtattggtctaacagaccatagtaaaggctttagaatcctaagcatcagtgagcctgaaaaagtctactgggcaggagagtctttgaaatcacaacaaccctatttttttcagaattaccagatgagacacttcagccaaaggctggagccctagatataagagcttgatttaggctatttgttaactgtgatatttctgaccagtataaataaaaataaactgtgcttcactggacctttgttttttgcctattgagctagttttatccatcaatttaccccagttggcagccttacctaagagaagcttagggagcagtagcaaatgtgtttttcagcacactgaagaccttatagaacttatctataaggtctccagttctaaagtgtaggatttaagacactaaacaaaaatttaaaatattagatagattttcccttgtactaactgttcactgaactaagaattatagaattcctgtgtatttaatagtgtatgcataaatcactttgcaaaggaaagagaggttaaaagttcacataagacatatatgatctctaaccaagtccttccaaggtgaaccaatttgctacacttacttgtaagaatgagagaaatccgatagtttgcctaagatgggatattcagaagtcattttcttgtccatttaagtctaaatctttaaaactctgaagccatgttactagtagaaccgagggaaatagcctagaatttttcttgtcacttacagagatgacagacttacaatatgatgattcttttgaaagcttcttacaagacctagaacttgtctggctccatttatctggccaggatgtatttctatgatttatccaatgagattcttagcagagccttacatttactgcataagataattatatttcttttctttgccatgacaaaaaccactctatactatacacataactttaaaggttgccttttttttttttttttagcatgtggacagagtctataaaagcttttttcagtttcatcatgttgacaagctgattccattaaatcacccaccaccatcatgttcacttttttttttcttttttgaaaagttagaaaacagtgatcatcttagagttttcaaggcattccctttggaaaaaataaatctggaaaaacatgagtctgttccttcaaatggaaaaaaggcccttctcttgaagctattcgggatagggaaggagctctcggtcttttaccccctgtaagatcggatgttttttaaacattctgagtatagatcaaacttctctacctcagtgtttcttatgtattatttgctacttcaaatggacactgcaagaagttaaatgaatgacatgaaagagattcgttcagggatttcttagtattttgcaccctcggatgcaatgcaattagataatattttaggatcacactgctgttttgattagggcagatatatccctgctcctcccatcaccatgctttcctcactgagggggaagaaatcatatgatcatgctgctgctgggtcatttaaagcattgagtggatgtgtgaaatgagaaaaaaaaaaaagctcagtgtggggttaattagctctgtggcgttgtgggtgggtcacttcctccagaccaaatcatgcaggaggaaccatgcatgtgcagactgacaaaattaaaagaaagcccatgaaccttcagactctaggacaaaaattgattgcctttggaaacaagaaaggaaccctttcatgcagtgagtactttgggcttcattggtcagagatgaatggacttcccttgaagtgtcggctcaggccactgtcatatactgaaaatgaatctatggtttgagaaggacctggcaaatctggtacttttaaaaatttacctctgctgacactttttaaaatcatgtctttctcaattaggatactagccttatttttgaggtctcatcttggaaacaacataatttcttccccaaagtatgggtgaatactttatattttcgtaattgtgtttcacggtatttcacagactgctgcgggttccctgcctgctgagattcgttcagctgtggtttggcctgaagggttcccactaggttgtttacaatctaatccttgaagtgggaggttaaggagcagatagaaaacatcctcgatccctggatcattaataggtgaatacaagaattcagatatttacaaggaaatctcacaggccaggatttctagggcagaaagatattgtgagaggctcctggagcatatgctgacaaggagccaggaaccaatggagattatccatgaggaaaacactgacaaatatgttaataaaatttcagtgcaaaccatttggggtttcttatgtttctgcctaaattactctgactttagtagtaacagcacttcatggagtatacagagagtcaccaaatgtttatgacttttgagaagaagaatatgtgtgtgtgcacgtatgatgtgtgcatttataggtatatatctttatttgaagtaaaactataagcacaattggcttcttgaggtggggaagcaaatgaccccttttagcagtatacttggaaaactcgaagcatctaggacggaatttgccaccaccaccaccaccaccaccaccaccacacacacacacactccccaaatactttgcttattacctgtgaaaaaaactgaatgtagatcttgtatcaacagttaagaaaatgcaaattcccctaagtagaggcattaaaacaattaaatgaatatatttttagcaaactgagagcaagttgtggttggggagatggagagctcactaagagtatccccaaagaagcagtctcagccgcatttgtttctgtttctttaactgcctggtgataggaatgtggatgtggaaataagtaggactagaaggtgggggaagcagaaagtaagttttgctaattctaacaacctatgttatcagcttattgtgccacagcttttcaaaattcaagttgctggttaacttgacacctttactgttccattcattatgaagcagcataagcaatggctacatgcaccaaccattatcctagttaggttgtcaaagttagcttaatgctgactttattttctgtagtgatactaaacaaaacgtttcttttgaaaggtcttagacctctatcctcccaactcctgatcacagtaataaccaacctcaagaagtcattagtgaagactagaacaatatcctataactagtcagctatgaagaaattggcatagctgactctttgattcatgttcttatggaaataatgggttgcaaaataaaactacatttctttctctctctctcttgaattcatttttttactggatcttctctacaagttacattggaatgcagattttgtttttgtttttgttaacaagattcgaataacactcaaaggctttaaaagccaaagtccatctttagatatagctttcttctttaatctactgccagtttcttatgtatgtgtatttttaccttcctgatgccttcgcctgttgattggtacatgttagtgctttgcttataagagttgggcaatagttcagtgatccagtccaaatctgggccatagatagaatggactcatcttctatttaagaaaagtggcaaactgctttaaatgaatttggttcagacaaggtcattggagctgttcatctaaccctgtgctgtatgtaatggacacttctgctgagctccaaagctaaaaggtaaatagacaaagaaagccagtaacttgccacccctgttagaccttatctgtgagtctgttattagatttacattcttaatcatatggggcacattttggtcatttaaaggaattgtttagtggttctcctgttgtctttgaagatggtccaggaaataataatagtgagttcatatattactttctggaccttcaaaaaactttttctttaattggaaattgagtttatatacatattcaatatgaggtttatgaaatattcagcaaatttcttagacatgaaagaattaattgttagactgttttactctagataatcgctatgttaaagccttagtagattcaagtacatttttcccaattttatttgtgttatatgcacttggcaaattgaataaaaaacgtgagcaccatatattactattttgaatgtaataacttatcaactatctgtattgcttatttctttttaaactgtagaatgtattttactcaactgtattgtgattctgtataatttttagggtgaacattttatagaattttatagaatcatacagagttaaacaagactagaaaagttattgaattcattctcctgactggaggcagagctgcatttattttatccaaaatagatgaagatttttcctattttaagagagtcaggaagaaagaaatttcagaactgctcttagcaatctatttgattatttaccacttgcatatttagaatgttcatctttaagtcttaaattctgcactggacggtttaatgtcattttgccctaggacaaaaatgctgatcattatcctctttgtaacaacttttcttatagtcaaaaaaccataaagacacacctcagctctttcttccctaagctaaattatctcagtttttcaaacatttgcttttgtttctatagctctttctatacctgagtggcaaaggggactatttttaaaagctctgtcatatgtgatgcctcttagagaggcactgcatattttaatttcactgtgctgatgtggaaatagccacaactttttcattatatgctgatggacagggcatttgtgttcatttaaccttgaggtttaaacttgttcccgaaaaagtaactgactcatagcattggctagacccaagaataaagagcatcagttttcctaatcttcaagctcatcttgcccccactcctaaaatgcactaaaattaacttttccttgacctctctctggtgctatttatttactgatttaacaactttcttctgtcatctctgtctcctaaaatagacggacagcatttattcaacaaacattggagtgtcgtgctgtgtttcacacactatgctaggcttgggagattcaagtgtgaaccgttagctgactcagagacatagatgtcccaggccatgttcagggaagagcaaataggctgtcaccgtatataaagaagcagcagtgggaaaattttttattaaaagtagagaggtgggccggggccagattgtgaaaggtcttggaggctcttaagcaaatagttggtagtgacaagtctaaatgattagaccacatgatagcagtgccaaaccttttcagcatcccttaagatcagtttactataagtcaaaggtcctggtacatcaatccctttggaatttatagagctacaatttcagtagtttaagatatagaagagaaagttctttggaatcagattgtaaaggattcctgaatgtcatcatgctaaggaattgtgtctagtttagcagcaataaaaaaccatcctaaatgtattaaacaaattcggtccttgccacccctcccagcactactgctttcatttcattctagtctgtcagaccctatccccgtaagaatcaagaaggaacagggagattcatatggggtgggatggagtgttacattgtatcttggcaatgtctcaggcgcagaagcagtcccagacctaattgctgaactttaaaatcttctctctttattgattataaccttatttcatcatcaaaattttgaaggcaggccattttttaggattgttatcatagcatcttaagaaaaaaagatctcagtatcattctcttattgttcttcttgagacggatccaaaataatatgcgttttggaaagcagaccccaagatatgtatgaccatttgtggcatttatagtcttcttcttcctgaccaaaaggaatgaaaatacatcaagaatctgtcctgcaggaaaccccaaagtacctagagagtgatggcacaggttctgtatgcacatataaatacccttgcatctggctttctcctgtaaaccttttgccaaatagaaaatagagaattaaaaactcccaaattcaagatgcatgaaatgtcattaaatctagtacaaatttttttgaatctgtcagataaaggaaatcatgtatccagagtaaagatggaatatcagttgacaggcacttaattttgagagacatataaatctaaaaatctaatagtgcctcatcctttgaaaacactggaaaccagaaaggtattaggaaaatcaataaggtaaaaatcatcatcctactatttggaatgactcccacataagaattaattaacgcaatacttctagaacgttaaagggatgttaaaacattatctctaccgatagaaaacaaacatataaacccatctaacttttagacagagtagttaaggaaaaaagattggaaatattaattaagattggaaataagaggtcatttctgtcctgttgtcacaccatttaccctcttcagctagaaggataagtgtcaaacttcagttcatccaaattcctcagctctgtcatcagtgcagtgacacattctaattttctgactcatttgtgatgaataatctctcccttttctattcacaatgctgaaagtaaccaattttggtgtgagttatgattacttattttccctttttttcaattgcactattattgttttctcttagcagaatttgtctcactctttatcacccagtgtgaatctcatgttcagaaaagcccatggacagtaatagtgcctaggcttggagttagtcaagaggaatgagagtctgacgacccagattctgtttttaacccagccagatacctcagctggcaagtggttcagcttcctcaccataaaatgggtataataatagctttcgcttaccactgtgaaatatttagaatgcaaatcaagccaaacctgtctgcttccaaagagaagcttaaactagcctgcgtaatcctgaatgagcccagattcaaggggaaacataaagtgggaaactcctaaaggtagtgtaatttagtggttaaaaatatgtagattttggaatggcacacacttattcagacgccagcagcggtatgatctgagctgtttcctaatttctcaaatttctcttttttctctagtaaattggaagtaacagtattttctcttgtagtggggattaaatgatacactgctaaccatgcttctcaaactcttccacttgggtgatcctcaagttagagtgagtgatccaatactaagggtgcctgccaggacattgcttgaagtagtctgccacaaacaagacttttcagtgaagtctcaggtttcacccaaaaaatatatacacagattttcctttcagctcctcaatatattcttgtttgtttcactcaaccggaagttccatgaggacaagaacagtatctgttttctttttggtataacattgaagaagtagttattggataaatgaacacgtgtgcaaataagactttaaattacttgcccacaaggaatactgaccctccaggaagacagccatgtatttactatttattttgtggctttttctactcccgttacactgctcacattcctgggtatactcatatccaaatttgggaaggatttatttctcaaggtacctgaaggactcagtagatagtgattcttatatcattatcatctctctgctcggtactcctctactccattgttgctaaggctttgtagatttttttaaaaaagaaattataaaggactaggaaggtaggagtctggcaggccttcaaagaagcctgtgtggctctaaccacatacccttacccacttagaactcttttttatacattttctttgctgctggctttagtttatagcatttcatgaaaactctgtagaggtgagtagctatgggattgaaagagggtttttctcccctgtctgcctaggccaggggttcctaacctgggattcatgaatggccttcatggagtctaggagttccttgaaacttggtgtttttgaggagttttctggagaaagagattctcatagggatcggtatcacttcaaaatgttgaaaaccactgctgtagaactttacataaactacactagaattgactttaaagttataattaataatatttttgattcttggagattgacactatataataatttccactcagacattataatacgaagattaaacttcacccctcgtcatccccctctctctgctcatcccccaccttccaccctgatattttaacgtcctgaattacttgggctttacagttttatactctttgctagatatatttatgctttgaacaaagtgtgcttaatgcaaatgtttttaatcctctgtgaaacttttatagataattctttgcatttcagataaaaacaacttatagacatataaggtgaatatcacttaggtggaaagagcatgtatcaatgaaataacaatttgaattgagcaaatataaatctatgtagattaatacatattctcagaattacatagcagattataattcagtcaagaagtaggtgtcttttgatgcctatgaacatttatgaattgtgtaagaactctgagattaaatttttagccatactattaagtttgggatcatattatcattttatattaacatataagtacaacaattatatccaataaaacttccatctaacttggctttaatttgttttagactgtgacatacacactgtaatttttctctccattttggattcctatcattgacagccatcctgtgtgtcatttgacatccaggaaagatagtttttcattccagacattggatgtgttagtcaatttgggtacaacttacattgatctcttttgatcacatcaaaaatttaattttaactaattttatgaataaatgcaccttgaaatttagaaaagaaagttatgtgtttagatataagaacataaacactaggtataattttagaagagcataatattgttgagagttattgggtttataacatgcaacagaaaaatgatcattgaacatatttcatagaaaattgctaataatattttcttcttctccccaaggttagagaagacagcaagttcaaaaaaggagagggaaagaaagaaagagaaatagagagagaggaatgtaagaaaggagggagggagggagggaaggaagaaaggagagagggagggaggaaaatggtaagaaaatatgcccctgtgccatagtctaatatcctggcttgcagagaagactagaatatagcaaaacttagagctttaaaatctttgaagactagtcagtgttatatatatatttcaaatttgtatgtgctttcaatgaatcatacataatctaattctcttgcctaaaattttcattaaactcatgaattttgtgaaacaatttgaaagcattggagatctccagcctctcttgtattagcattataataatccaggctggagattttcatcttaactcgtcttgtcaccatcctgcatcaagtacacctgcatgtacttgagcaaggtttcacattgaccacaaagggaaatcatttctttgaagaaatctctacaatagtgcagttgtcccagaaactttccaggaagggtgatgtctttaattgctggttttctgctttagccttttcaatgcaaagatacttaatcaggtccttctacttgatctcctttagtgaagtttgttttgcatatttctggaggccttatgtgaagttgttaaaatcatggtgtcagagaggcaagattgaatcaccctgtattaaattcttgatatatttaagtgggctagaggtagggggacctgctttgttttctcagtatctttttttggtttattaatttgtcatggctctcctcctacttcagttttatccttctaagagaagctatcaaaacactgatgggtctgggcacggtggctcacacttgtaattccagcactttgggaggccaaggtgggtggatcacctgagttcaggagtttgagaccagcctggccaatatggcaaaccccatttctactaaaactacaaaaattagctgggtgtggtggtgcgtgcctgtagtcccagctactcaggaggctgaagcaggagaatcgcttaaactcaggaggcagaggttgcagtgagccaagatcgtgccactgcactccagcctgggtgacagagggagagttcatctcaaaaaaaaaaaaaaaagaaagaaaaaaaaacaaagcacaatgatgggcagaccagtcctataatagttttttttttttttggcctgtgatttttttttttttgacggagttttgctcttgtcacccaggctggagtgcagtggcgtgatgtgggctcactgcaacctccgcctcccaggttcaagcaattctcctgcctcggcctcccaagtagctgggattacaggcgcccgccaccatgcctggctaatttttgtagttttagtagaaacagggttccaccattttggccaggctggtctcgaactcctgacctcaagtgatccacccaccttggcctcccaaagtgctgggatttacaggcgtgagccaccgcgcctagcctggcttgtaatttaaagagtgaaatatcagattttaaacatagaacaagaacactgttagggtcagcttctccaaaatctaaaattttcatcatttcatctgaaattttcatcaccaaacagagttgtgtttggtgggagagaagctttgtttaaaatcactttatcagattattttccaccatagaggggacattctaggctggtgagaaggggtagaggcagttttagaaggcaagtccggggcaaacttaggactgagttcttagctacacacgaatgtattgaatttgttcagaggaacttctggacattaaacatactaaatataccttaaaagagacaaagtttatcagggtttgactcatctttgtcaaaattagctaaaattggtcatgtactgtatagtaaagcttttacctattctagtcagtgctgcccaatagaagtttctacaataatagaaacattttctatctgtgctatccagtaaggcagtcaccagccacatgtgggtattgagcacttgaaatgaagctggcaagactgaggaactaaatgtttagctttttattaaatgttaaataatttaaatttaaatagacaaatgtggctagtggctattttgttaaatggtaacatagctctaccaaatcctatatgatacagattagaatgaaatgaacaaagaaaggtctttgcactccttgtgctgggaagtactgtcttggtcatcatagcagggggtcatacctttagaaagtttttatgaagctgggtctcctttattttgaggctagaagtgacaaaataggctcctttaggaacaaccagtcccatctatgcctagatttgctttctttcttcccactgtatcattttgcttttatatattggttttgcatcatatatcggtttgcttttaattccttattttttctttgattttcagatctttgaccatcagtctgtgacctgccccttctctttacgtaagtaaaagtgatttctttacctttaaaaaaaaaagtgtcagatttaggaaattgtggttttcactggcatatttcctagttgactttgttgtggtttctagtgcttctgtagtgtgtattagtttcttttgcgtttggagtgtatgctgttggtggtaatactaagttgctatccatgagggtgcagaaaataccagtggcccagatactgtacttctataaaggctgccctttacttggctgcagctgctgtttgcaaaagtcactgctcttttaaagtatagcttacattattcagccaaataccagcaacagttgggcttttgctcccctgtcaatcattgggcaattatgtattcttcagttatgtacccatccctaggtccaatagtttttaattttaacttctagatcagagctttcatttattgacaaaatttctaatatccctttactaagaagtacaagactgtaaaataaatagactaaacttttgtgcaaaattatgaagtctacaggggaaaaaaagaaatcccagattcacgtgtgccagaaggtttataaaggtaccactcttttttagaaaagatggaaaggtattcggggggaaaaaaaaacacgattttatatgaaaaaaaagagaacgttcattatttaaaattcaaaccaggctgcactgaatgggtttaaataaattttattttgaactgcttgaaaaagattctaggccaatgaacccaaataatcaaagtcacttataagagacaccacccaaaagatcctacaggtagtgatagtcacctaatgtgataaataattatcggtatcctctggctgcttctcactctctggtgagctctgttccttattcacaacattatatcttgcttcactgactcttcactccaaggtatttcttgtattataatcatttgcacagaatggaggttcccatggctattttgtttatgcgtgccttccactaacattcctagaagatagtggcaaatatatttagggaggcagaatcctccaaaggatgctaaggctaaagtgtaacgtgacagtttatttgacagagaaaggagattgattaaactccccaaagactggagctgtgtgtaatgcatttatacaacaggggtgggtcctacctgtccctgacaagtcttgttattctctatttcagtgttgatagagtgggtctgtaaatgctttggaggatgtcaatatgcatgcttatggttaccactttatatctgcacagccctcccctcagttacctagcactgcatatttctagtcctctgactggcaaatcatttttgttacagttcttttgtgtaaaaacagttcacataatagctctgtgttagacaaggcattaatcctcacatcaccgggatgagtcagcacagtgcactcctgcccgcacggctcagctattgtgacgtcagtgctatagggcgagcctcagacacaagcagtacaggggacctgtgtcaccaattaggaatcaagggggagacttttgagataaaaagtgtagttgaaaggctgtctctggctcataggaaaatgcaaatctgattctatgctacatcagccatcagttgcatagcttctagagatatcctattttttaaccacacataaggctgggggagtgacctataatgagcagataatccgttcatatacccatgaccttgtgccatccctgggccaggcttcatgtttgcttggcttgttccaaatcttgaagctgccctcatatcagcagggtgaccgggcttatgacagtcctactgtcctcaagtatcccatagacacagttgatggttgatggctccagagtggtgccccagaggctcgacaaaaggaaaagaaatgtccaatgtcccttgagaacagatcagaacattatctccccagtgctttgactccaagtgcctcttcaatggcctcctctaaacaggtacagaattctgcttgttcgatcttctcttagcagtgcatttagtccagtatcacaatctgtatttgacctggatttcaataggaactgaagagctctcagatgttcccccaagaatttcccattccattactgtttagcagaaacaaagaggaaccctccataatctgccatgctaccttgaagcaggtagcacagacttaccttatttgggaaacttggttcttataagttaggtctctatacaattcagattcagatttattctcaggacaatatctttcagtattgaatattaagtcttgaaaagggtgttaatttacagccttagtggcagtctctgttaaaaagaccttcctccatcacagaatttatccctcactcttactgtcaccccagccagtcaccagcccctgccatacccatcagaaagtgccttactgctgggatcttctgccttcattagattgctaatgggctcctactatgcttataaaagctaacactactacttggcttcgttttgattaattatcatgtacagctctttatttagttttcattcaacaaacatttatggaaagctagtcactgtgcttggttctggaaactccgggataaataagaaatgctttcttttgttagaaatctcagtctgataggggagatacataagtgaataaagactatagcatatgataggcactgaaatgcaggtatatacaagacgtagtaagaggaatgaaggaggagtgcccacttggatgtggtaaggtgaccaggctgggtcttaaagtcagaagagtaaattgcagtttaccaggtagatatgaaagagcagaaagaaaaggggatcataatcaagaaaaatgtaagagcatttacaaaatcaggaggcgttaagtagcagcgagattcagaggagtgaatagttcagtgtgattgaaacatggtggttgaaagagtagtatgagattgggctggaaagcaggcaggggaccttgcctgccatacggaggaccttgtatgccgtgcagaggagtttggacttgatcctgcaggctcaaggaggctttgaagaattgtaagcagatgtatgttttagaaagagcacttggtgaaagtggagaggctgactcagaatagggagaccaggtcaaaggtaaaagccaaaggcctgaactgtgcagtaggggtaggatggagggagaggctatttggtagtgttgaaatagacattaacctttgtgtaattccagcatatcttggcctattgcataatctttgccttctaggagaaaggctgaaacattgtgtggagtcaaatttcagaccaaaatacatccttatgggatcttcagcaaagacctcaatttgaatatgacctcactttgagctactgccccctggtcaccaggctcgcgtgcctcctactgcccatagtgggtgtgagggaggagcaggcagataaggagaagacattcccagtgtcctgcttgtctcttctttcacctgaaaatgaaacagtttctaaataatgcccccctaaagtcaatcaatgccccaatttcctatcattttctcattgctccctttttctaagcaaaatttccaaaccattgaactgaattgcaacttatgcacagccgggtgttgaaacaattcagtgtattcattccttctctctgaattagagttcaccataagtgtgcttttctcttgttcactttgggctgccaggacaatttaaaggaaattttcaacagcttatgtttcatgtactatgttctcttttgcaaatgggaggatatgcgtgggtgtgtttaagccttctctatattgctttctggagaaaggtttgggaagatgaacaagacgaggagtagggacctattgaaagcccaggtcccccagtgacctgagtgcagaacgtaggctggtgatcagatggtcaattatgtgtttgtcaaaacacagtgggctgcattccaggctgccagctttggaagcccagcttctgccaaccaaatgtcatctgggaacatgcaacactgggcactgtgaaggagtttgaaatagaccatgccacagccaacctactgccagtcttatagcaccaatatggcatgcacagccgggccccatgtttcagagctcaggaattcactgtactaaattcaagaggtcagatgggttcatgttttcaaagcctatgttctttgctttgaacactgtgacttgctcctcagcaatttccaagggatttttccagtcacatctctgtggaaaccactctttttgtgatggttataagatccttgtaaatgtcccagaggataggaaaaaaaaaaatcaacttgctctgacaatgactatgatttcgacagagggattccaactcttaggaaattacattaaaggtgcatagcttttaaaatatcaggaaccaccttggcaacttataaaaagcagaagggctttgcctattttataaagtgatttgcatatacctgcataaataatgtccccacctgtacttttatgcatttaggttgaataaattaaattttgtgatctttaaaatattcactgtctttcattgctcagacaccattttcaggacccttcctcctcatttcttttcctagtgataagagtggctatttttttttcaatcttttgactcattcagagaatcaaaacactctgaacaccaatcgactatagccaggaatattacctccctctggttgcatttctcttagcctttctacctatcagatggtgagttccatgtatttttaataagagaaataaagtattactaaggcgaaaacacagcacaagacagatttaagttctatttacatatatatgtaagagagagagagactgtgtgtgtgtgtgtgtgtgtgtgtatacacagacttgcactgatacacacctcagggacatgcccatagtaaccttttctttctttcaccactgcactgcgacaacctcttcaggaaccatccagctactaagccatttccgttgtaccttgggccttcaaatcaaagcctggtcagtaggccactctcccccacattcacgctttaagatattattaaaaacatgctatgtacaaagaataatttttattggatagttaaagcataaatataccataagtacatgaccctttcttgctcttaaggaatttaaaattgagttaggaaaaacagttatattgttgagcgttgtgtatgcacataagataataaatgactaagttccaaaaggaatgatacagtccaggaagtaccatagggtttcattcatgaaagagccttgcaggctagaaagtttcatgtaaaactgattcagctgagtcttgaaaactggctaaaatgtaaaaaagatgaagagaaacagaatcatattccaagcaaaatcatataccaaagtgttggaatcttcgagggggcccataaatagcatcacttttccccacttgaattctaaacctattgaaaaataagacaaaagaactgatagctagggaaccaaaatttttataaaggttggttgaagagcatagcttagtgtaaagaggaaatgggtttgctgactctcttcccttcagtcaaacctttcaaaagctctcttacaggaaaatgtggatctgcatatgagcaacactttccaggtcatcacctcccgatagtctcagtagaaaaggaaggacaaagaggttaaactcctgtgcttacaaatttggatagatcagttctacctacctgagaaatatagaccaagggctttcccaccaatgggatactttgcctccatggggaattataaggaatgagacaagaggaaagcagtgtttagaaaacatctggaaactaggagtagggaagaggcattcttacccacactgacatccatagactggaaaacaagaggaggaagtactgagtgagatgaaaatgggaaccagagccacatctggtctgagagcatatacctggggtaagaaccagtagtcctactggttatccaagatctaaactaagggccccttttcagagtctcaaaagttacaagaatcagaacctgggggaacaggcaagaaatgaagataatggacaaaagcctagttaggaaaaaaaatacaaaaactctagtttcttgttcaactaataataacaataagaaatacctattgagtgcttgccttgctttagatactggactaaatacttttcatggctatctgatttaaccttcaaaactaccctattaagtagatgctactataatcctaattgtgcagatcagaaaactgagatttaacatgtttgatttattttataagaacatctaataaatggtagagatagaacttgattccaggactatgtcttaaaagcctcagccaaattttactggacacaaagttgagtgtctactaaatactaaaggtatatataataaaggaatattaacatagtctctctccttctggagcttataatctggggaatgtaagacagatactaagcaaatggtctcacaatataacttgtaattacaaattgtgcttaccactatataataaaagtaccatgtgctctaagggcaaataaaagaagaagatttaactgagtctggaaattcaggagaagcttctctgaaatagtaacatttgagatgacacctgaaggttaaaaacaaaaagtaaggatggatggtggaagaggattccaggcagagggaacagcatgaagtccctgaagagagctgcacagagagaaaaaggtgactagcagcccaggttgaggttgaagagatacgtaaggcctgatgataacaggtccttggtaggccatgttaaggatttttgtgtttatcctaaggacagtagaggagcaaacttaagaaggactgtggcatgatcattgttgttttttaaaagggtaaactttggggcatttatcccagagagatggaaacataactgtacaacacctgtacattatgttacaccaatgtacatagcagctttatttgtaatagcccaaaactggaaacaacccacattttcttcagtgggtcagtggttaagcaaactgttatatctataccatggaatacctctcagcactaagcagaataaattattgatgcatacaataactggttttaatcacaagggtattacattgggtgaaaaagctaatctcaagatgatgtactgttacgattcttatctatatagcactcttgaaatgaaaaaaatatgtaaggattgagaacatacttgtggatgacaaagttagggagttgggatagaaatggaggtgagtgttgctataaaggataacgcaagggatcttttgtgatggaactgtcctgtagcttgactgtggtagtattcatgagtgtatggatgtaataaaattgctcagaactaaatatacactcacatactcatgtgcatataaaactgatgaaacctgagtaaggcagatggattgcaccaatgttaatttcctgattgtgatattgtactacagttatataaaatgttaccatttgggcaaaactgggtaaaaagaataacaaatctctctgtattatctcttacaactgcacgttaatctaaaattatcttgaaattaaaaatttaaaaatatatatcaaggtagcttaactttggtaaataatttggaaggatcaaaaatggatatgaggaaaccagtgagggagctattccagtagaccacataagaggcagactagagtattgacagtggaaatgggaggaaattgatggaactgagagataattcagaagtaaaatattcctggactttttcatggttggttatgtgaaataaaagagagaagtggcaacaatgactcctggtttggggcttatcaaactatatgaaggataataccattcacagttacatgaaacaccaaaggaggactggagtggagagaagtttgtaagttctgtttttgagatgttgagtgtgaggtactttggatagatacatagtgagcatattgcacaggtatttatatacataaaactggaattcagaagtaacatgaaggctggagacatgaattcagggtaatcgacatatagtggtaaatgaatctgttggcatgaataacattgcctagggacagggttagattgagaagaagacctaaactgagacttgaagagctcttaatatttaatccgctggtagaaaaaaatgaggccataaaataccctcagaaggagccaccaagaaggtggcaggaaaatcagaaaacataggcacagaagccaagagagtgcctcaaaggtagtggtcagtgatgtgacatgttactgagcaatcaagtaggttaaagactaacaaatatatattgcttatattaattttgagcttattgttgacctcagcaaaagctgttttgttgaagtggtcaaaacaataacgtgtttgtaatgggatgaggagagaatgagaagtgaagaaacagcaaatgtgggccactcagaagttttgctatgaaggaaaggaaaatgagctactgcaatatcttgaggggggaagtgaggtcaaaagaaggttggaaaagcatggaaacactagtattttttgtattttcatgggaagaataccgtagagaggagagatccaatgtgcagaagagagaagagcataggatgactggcagtataagattactgataaggccagagagatggaatcctgagtacaagtggagagatggaaggagggacacatcttctatttttgtaagaaaggaggagtaaaggaaaggagcagatgcaagcccacgtgtagatttggtactgaaaggttaagaggtttcccaagtgatgggcactgaggggcaaggtcctgctaagaataagcggggaagagatttaaggaaagtagagatttgaaatcgttcttgagacaaatgggacagcaagttgaccagagaaatacagtaggactctccttggcagtgtggaaggtgcaggtgagtctggtgggttgatgttgatacctatctgctctgtcatgggattttctccagcagtttggggaccaaggtgcaaaatcagaagaaatgagtttgaattaggatagggtttcacctagcatttgtggcattaggagttttagcttcttgttttggttctagctgaggccagtaagaaagggcagtgaaagggcttagttaaattctccaggcatctgttgagtatattgtatcaggcactgtgtttggtacagaaaatacagaggtgagtaagacaccatctatgccttcaaatagctcacagtccagggtggtttgtaggctgatatctggtccaaaacaccaggaacagggacttgaataacctttgcaaggaccaggagaccgatgtcattccttttctttcttatgcctgctccttccctctgccctgtcctcacaatacccagtttgtttttgtgttttggctttttgttttgttttgttatttactttctcaaaaaatatctactctctgccttattgccaagcctctagtatgcatcatacatatgtgagagacaactttgatttctcccattatctttttgctaaaatatgatgatttagaaacaattagatcatctacttgaagtatggtattggtatagtgtgaattgtctctaaatgttaagagctggcatctaacactacagaaaagctatttatttaagagggctggagacaggagtgtagacaggtgagagagggaacaagggaagaaagaagggagggatggaaagaagaggaaggaagcgggccgggcacgggatctcacgcctgtaatcccaacactttgggaggccgaggcaggcagatcacgaggtcaagagttcgagaccagcctggccaacacagtgaaactccatctctactaaaaatacaaaaaattagccgggcatagtggcgggtgcttgtaatcctagctactcgggaggatgaggcaggagaatctcttgaacccaggaggcagggattgcagcaagccgagatcgcaccactgcacaccagctcaggcgacagtgtgagactccatctcaaaaaatcaatcaatcaataaatatatatataagaagggtaagaaagcatattaactacacaagatcttatatagcagctcatccctgtttgttattcaagggaactcccatttaaaatgaataaataatcctccatccctaatggtgatctacaccatcagcctccaaaaacagcttccagacctagaaacgtaccagggtactataggttaattataaattccaggtgctggtaatgcaagagaagatatggagagggtctgaaggaggtggaagtttataacttccaacagaagaaagatcccttactcagatttattttaagcattataaaatgatagcttagaaagaggtggtggccgtgatggcttatctttatttgggcacattccattctgtgatattccctttaggaaatgatgttagggtcatttgactaaaagctaaattgctgatacatctggggtaaaatttggcagctgtcgagcgaaacagcttttttttaatatttactttttttatgattctataattcacacttattgtgaaatatttagaaagtatagagtaaaggggaaacatccataattccactacacagaaccaactattattaataattttttagatcaccttctagtgtcttctctagattttaacatgcctgagcatacattgcatgtatacagttgtatcccattttaattcaatattatataataaatacttcctggtataattaaaaactctttataaatagcactataacatctgaataatatcacataaagcccccagaatttacctaaccatgccctagataaaaatatttgggttatattcactacttgaaattttatattttaaaattctttaagggaagaactatgatgtacatctcaaagtgtcaaacttgggggaaacttgaggcagacattgatgtcaccctactaagagagctagttagtaattgctaatgactgaagatcatattggaatttttaagtatttattgcaggttttaggtaagttctttttcccccaaaataaaagttctaatttttaattctaaaaaagtatacatttagttttgcttgaatttgtttcattgatagtatttataaagagcaaggttaaattcctttgaaatctcacagcccagagataatcactattaataacttaggaaatattatatttccatacagtcctgtttatctttctctttttctttctctttgtctttctctttccagactgaaaggagaagttacttgctgttttgtattctattcttttcacttaacattgtaatagtcatttaccatgttaataaatatagatctacattatcttttgacaacaacgttgcacttcagtatatgcataatttattgactcaatcacttattgatggacagttgggaatttggaactttcttcttactaaacaatgccacaataactgtctttatatgcacatgcatatgtacacatgtttgtacacttacatgattatttccttaggatcaattaattatagtggaactgcaaaagtaaaatgcattactaaactgtcctctagcattggttaatatcttcaccaacaaaaaaagagactgcccatttctctgcatcctcactaattctgtaattttcagtgataatttttgccatatacatgaatattttcatactggaggtatgagatgcattttccaggcataaaaccaaagcctgaaaactttttaaaaaatacatgtattttaaattttattacatgaaaataaaaattactatggtagaaaatcattttttaaactaggaaaaatatttgtgatatatccctaatattttaagaatagctataaatcaatgatgaaaggatgaataacacaataaaaaaattggaaaagacaaatgagccgtctaacaggtttgtttgcttagtctcattctttactgcaaaggcagtgctccctgaagtcctccaaggccacctcaagctctgcttcttatgctctgatggcaacacctaccctcaccgcccttcaggggagtgttgtgggaagcaaagcaccaccagagacctatgacatttctgggttgggaggtggtaagtattcacctggttacatacatttatgtttatttggcatcaccagccctcaaagggccaggctcactcacatgaatgtaaaaattatcatcagcgctctgccttagactccagaatcagtaaattattgggaagggaaaaatacacactggcaacattgcctgatccatgtctccagggcaggattgacattattcttctcccagatgtagatagagatttctggatgttctcataaataaagtgctagaggccatgtcatcaacgtcctccatctttccccgctctctgattcccatgtgtattactacatacttaatgaaatggaatattcttcagcaacttcagggaaagtgaaagacgctagagaattggaaatgccacactaacagcatcacctccgcctctgccgtgcaaactgtgatgacagggcgtcttccctgtgttctgggacagggagcatctgggttctgggagtgagttcctcgagtcttcccgagggtcaggagttgtacaaagctgttctgggtggtaattggagcattccttgaccacagaagttcatttgcagatggtaagggatgacatgctctggggcatttttccccctctttggcagaaaattgtggacatgaaagtcatgtgtgttttaaatccttagacagtgtccagaaaggaagcaaaagagaggcaaacatgttagagtctaggaagtcccttcaggccaactacaagctaaggagaatggaaggaaccaggcctaggaaatggcttatcctctacctgaacagtcaaacacctcttgaggtgtgcacatatggttatgagccaggctttagtgctgccagcagtgcccttggagaccatgccactgactcagtgtacctagggctcagagtgtcaaatgtctcattttcttaatgatgctcctagaaagcttcacatattatccacatgcttctgtaacatagtttatactcagaagctggggttcgagggagattttaaatgttatatatacatatatatatcttccacatacacgcatcctacttgtttaaggagtcatgctactaggacacttgcagaggcatcttgtacaagaagtctttgcagtgataaaattaagagttttttttcttttatcagggttcttcttttacatggtctctttgtgtagtctctatattattcttcatttcttctaatgtgtgggtattgagaacagatcaggcatgctccagagaatcatttcaagatattcatctaaacaggtcaccttacctctcacacttcgataggctaaaatgggttctacctttaatccctggtaaatttctaggctttttgatacatgaagaataattctcacctctaatttaaaattaaccttgtactttgaatgagagaaccgtgtgtctcatgaaagaacatgagtgaaaggtacacctaaatcttttaatagtagccttcagcctagtccttataagctactcaaggacacataagaaaagtaatgaaaagtcttcagtcaaaataattttctgagttttttttctatgcttttatccatcaccaccatgcttgaataatcttcactgcattggttcttcaccagtagctttcacatactcctctaccagttttataacagtacctttcagtaaaggttaggaagaatcctaacactgttaacttcctcagtaagcatgcactatctgttgacagggtgtctgtagactatctatttacttaaaaagaaccaattttttcatcattacattatcatcagtcattaacattactcatctagaatgggtacagaggcaagccacctcctagtaacctatgtgtttaccactccatcccaaatctctgatacacttagaaaaaaagttttagacatgtaggataacattctagaaaacagtttcaaagatctgaatcttagcacaggaattcatacaccgccccccccccccacacacacacacacacactcttactgaccaccattatttggaatttttttttatttaatcgacaaagaactacagctaaaacactttgaagtattccttttgaaacattttgatgttggattctggcttattccttcttagaaaatgagggattacatttaaatgtcaaataaatgcttgtacctaatgtgttagtccatttttgctgctataacaaaatacctgagactgggtaatttataaacaacagaaacttatttttcatagttacagagactaggaaattcaagattgaggcacctgcaaatttggtatctggtgaagtcctctctgcttccaagatcgcacctcttgctgtatcttcatatggcaaagggtggaagaggaaaagggagagagacagctccttcacaccttttatataagggcacaaatccattcatgagggctctgccttcatgatttaatcacttcctaaagactccacctcttaatactatcacatgggcaattaagtttcaacatgtgaattggggggtggtgaacattcagagcatataatctaataagaaatgaatccataatttttgaccgttgtaataaaataatatttcattaagcatcactcatctctactcaagtagtgaccaaaagatggagatgttcttcagagaggagacaacagctctctgtgggtaacccccaatatggatgcagatttggaaacaggaaagcatgcaagtaaaagcaccagaaaaacaaccaagagatgtctgcaccttaactgcactagccaccctaaaatgagttaggctttataagatggaataaaaaacatgcactctagacagtaatccacttctaggattgtgtagggttttagtttcctctcatttcttcgcaaaagtatttttgtaaaaataacttggtctaagaaaaaaagatttctccataccacagttggattatttcatgggaacagtataccactttggcagactgcattgactttcaggccagcatgcggatccagggaaaatagactgagtgacccaggaggggcagagtcaggactggctgtatgcaggagtccttaccatcttccaaaagctaccaaatcaatcctttatttcctgtctcaacaatcggcattggcaaatttaaaagatcaaagttccttttaagacctgagctattatattattatatggggattacttctagatcagctactgttacctttgtctgtggtccagggcctcaaagcacttccatacacgtgcgtgcgtgcactcacgcacacacacacatgcacgcacacacacacacacacacacacactctattgatatgagcttttctcctgcctattagatgcattacaaatctgcctataatggggcctctctgcattccaacaaaaatatttctggagctctcctggctcccacaacatttgctgggtgcacatttaatatgttttagctttactgcctgaagatggaatcagggacatctacctgcacatgacagtgctttggctcttgcagttgcagaacttaatgtatgtatcagtaatgaaaatcttaattaagaaagctgcatcattgtccatgaacactcatttttctccccctgcaaagccctttgtgtattgcagtatatacctggtccagacagacagagccctcgaagagcttgtctggcagatcttctcttgattattaacagctagcgaatgacaaagtctcgctctccttttgtcttgaagctgaggcttggaacagcagagcacacaatgtactgtagggtttgtttgtgtttttttaaacttgcttttattacgttggtgggtttaaaaatccgacagtgttgatcaaaactaatttaggtaacttagagttgccaaaacactagcagatgcatatttacacatatactctcagaaaaatgtaattttccatatagaaacaatgcacaaacataagaagggaaaattttaatctgtctgcccatgtttctggtaactttggcctccagtacttaaaggctgcaacgtcctcacatatgtgaccttagcagttacttcttttcctgtgccattgtgcatgtgccaatttgtcatttgtgcaaagagtaagcagctttggaaaatggaatgactttatgcagacaactaactgtacccataaaaattacaagagttactaagaaggtcctttgaaccttagttcaaaggaccttcttagtactactcttgcaatttttgaaaaggtggcctataattatgtttatgaaacaatgccgaattgtgatattttaataaagctcacatcataattcccccaaataaaaagttaatcaacttaaaattctcttaaaagcctcaaagcatttcactcttcgaaagtagcaactcctaccaattaagtctatgacctcgacccatgtcctacatgatgaggagagagactcatgttctcagtcacttacatatcgttcagtcttctgcattttctaaatttctggtctacagtgttaaccatttactggtagagccatgtaaataattgaattggattcaggccgtatgcttatatgatactttctactggaataggacatattcacttaaagaaggtctgatagtaaatacttatgatctgtcttctgcttgctgtacctatactgccctcaccaagaggggagcagccatgctgtctcagatggtaatggtgtgctgcttatttactctccttataagttcgcatgctttcactcatttattttcaaaatcactgtaaataatggtcagttttctgcatatttgaagcaacaaaatatttgtacaaatattctttttgtgtatcatgaaagatatgaggaagacatcattatgggaaaattattttcaaatagtctaatttattaaaatctcatgattgcactcatagcatgtttaattaaagttaaatatgaaaagtaaaaatagacttatgttattaaactagaaccacaatgagaaagtaaaagagatgctgtcaaggctcttcactgctacataggaattattgtgaacaggttgttgcactctgaaaacttttcctttttaagaactatctgaccagtactgccataaatcctaaagcagctgtgaagtaataggcctatatttgtgctgcaggtctatagtataaagcatacagtaagctctcaataaatgtttggagaatgaataaataattatgagtgaataaggcaaagaatgaatagcactggcatttcaaagactaaatcagaaaatcaggtactgttcttaatttttaaaagtccttgattagaggttagaggtctgctgaatttctagaccttggtctataactttccaaacaataaactacttaaagaattatgaataatcttaatatttaaaatttgagcagattggttactttctacctccagaacacacacatacatccatgtatgtgtgtaaacagttactgggtcacaatataaaatgtagtttctactataagtcataaataaaaatattttaaaccctgccaaaaaaacaacaaaaaaattgtgtagattaagataatatcttctcctattcagaaaatctacagtttgcttaaaatttaagagtgactgacccattaaaaatcacaggccttctttccttatctatgaggtaactcagatttggcctccattctgctaggtggtctcctctccccttccttggagtgccatccaaatgcaatatgaaagtgagggtggagagcagttagatacagtctactcactatggtgtctggtcttctcagtgttgtcttctgagctcaaattccctgagatgtctgagagcccacctcatctttagtttcctgtccatgtagatccctgatgtgtcttccttgtcccagctccaaggcctcctcaagtcttcaggctcctttgtcatgtcttccttgctctgggcccttctgggtcatgctggggcatggtgaccctgtgaggttatcttaagtccatagtcctagacacccccctgcaaagacatcttcctgctcccacattgtggatgtgtttaccctcagacccaaccctcaccctacccttgctctacaacagtggctgacccatgtcagctagattccaagttggatttggtgcttgtgagacacttgtgagtggcaagagggtcagtagaaggcataggccagagatttcccccaccgttctttgcatcatcatcatcaccagccacatttcctttgtggtttactccctctgaacaaacctgctgtgactccagcttccctggtgacccaggcctctgggcatcaatagcaccatctcttcccattgtcctttcagcatagggacatagagacacagtccttcacctaaaagagtccactgactattagggaaggatggatgtgtaacacagatgtctgtaatgcagcaagaaacagagaggaaacagattatttaaaggatgcattgggactggagatgcgcatagagtcgttccaatacttgcctgcaaaatagagtttctcagagaaggcctaacagtcaggtggtatttgatctggatcttcaggaatgaatacggatttagcaagcaaatcggggagggattctcacctctgttatttctctgtgtctctcccaatgcaatgattttcaagagaagcttgtacactccttatgtagaaacataacggatctctcagggtttatcctcgtttggattagtaaatggggcagcactagagtagtaggatgcgtgtgacctgagtttcaactctgttgagtagcatcagcagcttacaggaaatgaggttttttttttttttttaatgtatccttttgtagattcgatggggccatttctagagttcagtcttgacctaaagacttggatctcaaggcactcaaaccgtcttacagaatgtgcaatccacaaaaaatatatacttaagccatttaaaatatattatctctatattggccaaacttctataatgaaacagatttcagactatcctgtaacactccaatctgtcagaactttcctcagaatactgtattttgctatttttttaaaacagagaaataagactattgatttacaactaacttcatctattagtatgctagaaacaatattcctaaacttgtcctttatgatctaataattttaaaaatgaaactaattgttgttctttccattgtttgaaaaatggaaaatgataatattacagaaaacagtaaagacattgaactgtttaaaaaaaaaaaaatgaccagccttccgatggcttaccatcctctttgcctctttgctgacatccctatgtgttcctcatcatttttgtgcttgaaatatgtattgtgtcagctttagtccagccaacaagttgagtaatccagcaggtttaggacaaagaagtgtgttgcaactgaggtaaaaggtctttaaaaagcatattagctgactatatggatgttcttcagttcaaacctgaccaccctttgctctcacatggaaatacatccactagcagtgttgtaagtgatcctatcagcaaacgtgtgcatcagtgctcctccagaacatcatatttacgttagggcttaataggacattcataaagcaacatgcagtttgttatttttaaatgcatgtgacctccttatttcaaaagcaagtatctttaaacatagtaatagcatttctctatatgcaaacctctgtacatgaaaaggtttacattttaaaacaaacatgtttttgagttttatccaaattcaaaaaaggcatctgaaaaatttaacagctgaaaaacactttctccttgctgggaaaacttaaaccttgctaggctttatgcaacttaaaaaaaaaaaatcacttctgtgctgagaactagcatgagaaatctcagcatgaaaggttggtggattttttttcttcataaaactaagcccaattgttggttttaagagtgatgccacaatatacatatgctttgttaggaacaaatataatctaatttcaagggcatcttcaacaaaaattagggggaaaagataaaggctacttaagcagtgatccagtgtctgaaagcaaaggttgagaacatcattgtaccatcaaggtctagaaatgctgctaaccctgagcgggttgttactgtttgaaaagcctatgggtatttgttttattgttgtctcactcaattcttacttagctgagagtatctcacaagggaagtactgctctgtgatggtgtcctggactttgttttctatttgtttcagcacttcaataaatggtctgttacctgccattatgacctgtatgcatttgctgagcagtttttcaaaacaaaacaaattatgtggctgtatttctagaacgctgagccattttcaagatagtatagaattagaaacacacatagacacgtccacacaattgtatgtttatactgaacacatatattcagacatattcaggaaaataagaaaaaagaaaataggttggacaatacaaatatggaaatacagcttgttcaatcatttagagcccatacttctaacggtgtacatatgtagacgtgactttgtaaagaagacccacatgtgtgtctacactcaagcatcttcctcttaatactctactgaggataaaggacacaaagtaatttttgaaatatcatgctggctacttttagagtatattagtgtgagtagtgacttaagaggtcaggtttaagagaagtagcaacatacttctattatttacatggtgatttttttttataagtccttccttgaaggcagacttagatatttcaagacctccttagaaaaatttttcagcaccttctgtgctccaaattgagtcagtttgcatcatgtttcagtgtaactgagtaacaggctagcaaattctctgctttcttattcaccaaaatccaaaatagaactcacaaaaactccttccttcttccccccatcctgaaaaaacaccctactgtggccccccccagtagaggaacagaccagaaaaaaaaagagtaaacagagccagctgtaactatagcactttgctcagtactgtgagcttgctagagctggcacattttttataatacagatgcataaatgtactgtctgaggcagaggaattgcagcatcccctttagtatttcttgactgccttggtctaaagtatgttgcacaggagaagcctccctaaacccagaataaaatacttaatttggtatctattttttaaaattgtgaccttctatgacttaatttttcataaggtttgtagaaaaccacctttttcagactttcacagggtttttccaaattcagacttccggggtctatgtcttactctcacacatacacatatgcatacacatttcagattacatatttaaagtaaaatatgtaaatatggactgttttaaagttattaaatgtgtatatgtgtttgtgtgtttgataatgaattgtttaataatgaactgttgtttcacagtggacataagataatcaaaccaatggaaaattattgtttaaaaccatgatagctattagtttttccagaatgagatatgcatttttaagagcagcttgttatggagtactactttttcttctctaaaattgtttgctagaataaaatttgttaaataaataattctgattaaagtgaatgggaaggagaaaggtactttacccaaaggtccagttaaacatccaaaattggaccaaaactttgtccaaaattcatatctgcctctgaggaataaagattagaaacactgaagtctaggctgggtgtggtggctcacgcctgtaatcccagcactttgggaggccgaggcaggcggatcacctgaggtcaggagttcgagaccagcctgaccaacatggagaaactctgtctctactaagaatacaaaattagccagccgtggtggcgcatgcctgtaatcccagctactcaggagaactcatgaacccaggaggcaggggttgcggtgagccaagatcgcgccattgcactgcagcctgggcaacaagaatgaaactctgcctcaaaaaaaagaaagaaagagagagagagagagagagggagggtgggagggagagagagacagagaaagaaagaaagaaggaaagaagaaagaaagaaagaaagaaaaaaggaaggaaggaagaagagagagagaaaagaaaaaagaaaagaaagaaagaaagactgaagtctatgcaaaagagtgcagggtacggaccgggcgcggtggctcatgcctgtaatgccagcactttggaaggctgaggcaggcggatcacctgaggtcaggagttcaagcccagcatgaccaacatggaaaaaccccgtctctactaaaaatacaaaattagccaggcgtggtgttgggcgcctgtaatcccagatactcgggaggctgaggcaggagaatcgcttgaaccgaggaggcagaggttgcggtgagctgagatcgtgccattgaactccagcctgggcaacaagagcgaaactccatctcaaaaaaaaaaaaaaaaaaaaaaagtgcagggaacaaaggtcattttcagtagcttagagatgaattccagaggttcaatcctgtgtttgaaaacagaccctgtgtccttttgggcacattaattcacctttaagcatcagtttctttatctataaagtaatcagaaaactcttatgatgattaaatgagatagtacacatcaaacatgtagcccagtaaggccaatatcaaccacatagaaaatgcttcgtaatggtaattatggatctaaattattttagcagtggtcgtatctttgaaataagcatttagcctggagatagaaatggtgcacacttaagcatgttatttcaggtatgtttttcagtttatatgtgatgtttctttataagcacaacgcataattatgcaaccagtattttgctttttcaaaggtgacatttattgcacactaacagtgttctaggtactgtggaagggattagaagcacatcttctcttatgatccttagaacagcccctataagttaccattatacccatttttcaaatgagaaaactgaagctgagaaagcatcagcagcttgcccaaggttagataactaggtaatgatggggtaagactttgatccaggcagtctagccctaaactgcaacctaagaaaataattacaagtaaacaaaagccattatgcacaagatatttatcatatggctgtggcttgactgtgtctccaaaagttcttgtgttggacacttaatctctgatgcaacagtgttggaaggtggggcctaataagaggtgattcagtcatgagggctctgccttcatgaatgaatgaatgccaccactgcaggagtgtgtgcattagttatcatgagagtgggttcattatagaagtgagtttggctccttcttgctctctggcttttgtgctctcttgccctctgccttccaccatgggatgatctagcaagaaggccctcaccagatgccagtaccttcatactagacatcccaacctccagaactgtgagaaatatattttttctttttaaattagccagtttataatattctgttacagcaacacaaatgaattaagacataaatatgcttttttacctttttgttctagatatttcaaacatatacaaaagtaggaagaatatcatagtgaactctcatgagttcctcactctgcttcaacagttgtcagcccatggtaaatcttgttagacatatttgtattataaaactggaaataagctagatgttcaactctagagtgctgtgttaagtatagtacgacatatctattagatagaattttgagccagtaaatgtttatgaagaacctataatagtatgaactatttatactatatattaagttaaaaggcagcatacatagtaatacatatggtataatcccaccttttttaggatttttaagattttttattactctcctatattttctaaattgtatatcatgaacatatcttaattgggaaaaattaatatttctctaatattcagaaaaatatgaatttcttcattaataaagacagcttatttacctagcctcacagagtaagactccatctcaaaaaaaagaatatacttaccataattcaaacttttctaaatgattcagggttgttatcttgaactacaattcaaatttgtttctattgatgagggtgtggaagtataaaaataatgctacatatttgaatgttattttatggtttccaaacttctcaattaaccatttggtccttattctataagattatttgcttctgtgtttctttaccctctgactgctatatctttagttctcatgccttcttttcgtagtttttatttttcttctttagctattaagttactttctgttgtgcaagtctctaagatcctcattccttctctgatgcattatttctaatcttctttagacaataaaacaaaaaaacatgttttgattgtgtgtaaagtacatacatgaactcattcacttgacaaatattgtgagtcgtgcacttgtatacttggcactggagaggatacacagataagacatgtcttgccctagaagttttaatctagcaacggagctgagacatgtgtctactttgctagaattaatagtgaaaagtgaaatgctctataaaagtagtacagataaggtattcttggagctcagaggagggctaactgagggcttcatcagaaaagatgacactggatttgggctttgaaaaacaagcaggatttgagcatacagagatagaaggaaagaacattactctatcatgagaaaagcatggaagaatcaaagggtaaagattctgcaaagaagtaattgagtttaacttgagcatggaatgtgtgaagataagtagtgggaaataaagcggtaaaagtatattgggaccagaaagtgaaaggacttgattattagggcaaggaatttggactttattcaggagacagtggggagctattgaaagtttttagtaggagagtaacataatcagagctgtgcctcaggaagattaatctggcaacagtgagtaaaatggattggagtagggagagaccagaggacacaagatcaggcaggagactattacaatagtccaggtgaaaggcaatgaaggcactaactagggcaggggcagagggaatgaacagagatggcaaactgatttatgaaatgtggcgggagaattaatccattatatttggggagcaagggagaggaagacaccaaacacatctctatgattttgaaccttagtagagtcataaacagagcagcaaagcaggagaagggttgggaggggaaagcacacgtttaattttgaacacactgagtgaaggtgccgactgggtatctgtgagtggtccactaggcttttggagacacgacactatagtgcagcagaagggccgggcttggagataaagattttgagtcacctatgcctcactagatagagaagcaagagaagaggcttttaaaaagacttggaggattatgtgtggtttatttagtaccaattttggctgcttgcaggtctttttcactttgtttgttcttaaccatatttggaatgccacataagtggtgtgcagatatgtgaagcattgctgtatgcatgcaaacacacaaaatagattctaaaataatgaactagtttgggatatagctaatggggtcaattttacagtgtccatagactatcttcacttgtaacatattcctgtgggatatggtttggctgtacccccacccaaacctcctcttgaattgtatctcccacaattcccacatgtgggagagacccagagggaggtaattgaatcagggggcttgtctttcctgtgctattctcatgatagtgaataagtctcaagagatctgatggttttgaaaaggggagtttccctgcataagctctctcttctctgccaccatgtaagatgtgacttgctcctccttgccttctgccatgattgtgaggcctctccagccacatggaactgtgagtccattaaacctctttttcttcccaatcttgggtatgtatttatcagcagtgtgcaaatggactcatacactgtgtaaccttagagaaatcactgtacctcttacttctctgggtctcagattcctcatcagatagatgaagagattgatcaagatccctggtctccataactggttgcaagcagccaaaactgacatagaattagaatcacttggggaaggcaggggaaggaaaaggcccaggaatctgtgatttgtattttctacttactttttattttttagagacaggggtctcaccatgttgccccaggctggcctcaaactctgggggtccagtgatcctcctgcctcagccttcccagtcaccaggactacagccacattccactgtgcctggctgggaatctgaaacctctctatgtgattctgagacacatcctgggttggaaattgccgggctacaaaacctcttaggttcactccagctcttatattctaaagctttatcaatatttagacaaaatatgcatttttcatgactcactcataaggaaggaaatatatcaaaaatgcaaacttactttcaaattcagttcatcagctaaatactccacctctctcctttatattaggaggacaatatatttttaaagtatttgaaagacacaataatttggaaatctcctgtgattttataaaatgtgaaagatatgtagtgtgtgccgaaggggtaggacggaagggaagaaagccaggaagtctgggacatagcacacataaagcgtgctgttcaccagccatacctggggactgtctgcatagccacagttgaagtatgtctgtgctctgcaattgatttcagtgctctggctattcttgttgaggcacgcagtccttgtactgtttctgattgtacctgtcaggttgtatatataagcatttcagaagtccttctgtgcagactcagcacaggtttagcgtgaaataaaagagccagttgagattccagtccaacaggtgagctatttccttaatgggcttatctttaacataccctctttggtttggtttccatcatacatttcatactttacctttcacatagctcttgttattacagcattgcctcagctttcctagatcatacattctgaagcttccccagggtcaacagcatgctgtattgggccacacagaagggaaggagagcagtgaggtatctttttttttttcttctgagatggagtttcgctcttgttgtccaggctggagtgcaatggcacaatctcggctcactgcaacctccacctcccaggttcaagcaattctcctgcctcagcctccgaagcagctaggattacaggcctgcaccaccacgcccggctaagttttatatttagtaaagacggggtttcaccaagttggtcaggctgatcttgaacacctgacctcaggtgatgtgcccgccttggcctcccaaagtgctgagattaaaggcatgagccactgcacgcccagctgaggtatcaattctttattcacttcctatgtcctctttcttcctttttcccagggaggacccagttagatgaacttgataggttagactggattaacctagactgtaaaaacaggttggaatttggaaaatctgaaagtttccaacttccaggcaaaattttgacgtcccattttgctcaacaagtatgttttgaggagttactctaagtagggaattctgctcagcttgtaaatcagaaattagcaaccaattttagtgattttgtctgtacactggctactacaaaaattctagacataagtgcagagtagaactagtgataatgatgatgttagtactttacatttatttagccctgaactgtcttttcataaaattatctttggtgccctcctattcgcctaaggaaatcctttttatccttgcttgtgtcactatcatccccttctcccacccttcagttccacagttatccatttcctttccccattcaaactgcagcttcttgactttagttacattcagttaggtgatctggtaaccttattaaagtaatttactccaaggtgtaaatgaggtttaaccctcttggagaaataaatattttaaaaatatcttgttagacaactgagtttctttcccctgttcagttaatgacacatgaagcgagatgtttttttgagtagagtcctcagttatatctcctttgccctctgacctccaacacacaatgttttatttacatttgtaaaggaaaaacatgaaatcagccaagcagtcctatatctgtcaccctctacatattctctcagtcgctccacctccctgatgtagctgtactttcaatgtgacatgacacccccatatatcagacatttgctgacttcaaccatgcaaccctgctggacccaccaccttgtttcctcatctgttcccactccaattcctgattcctggctgcatcttgtatttatcatcttaatattgatctttgaatttacctctttagattttgttcccatattctgggagagagtttagcaaagtacaaaaagcaaagctctggagtaaaatgccactagtcatgtgaccttgaactagttatttaccatctctaagcctctgttttctcacacgcaaaatgggagtagtgtaaaaattaaatatgatatatagataggatgaagaatattaagagttcaatgcatggagttattattgttaatattatttattatctttactcccctcaacaacttcaattgggattctcccctgattctaccttggagaacctttcttgagtgttgtatgctggtcaggactagtttcctggatgtgaccttttcagcattttatacacaaaataatgtcagacactacatattttctgaacaaagacttaggacataattttataaatacatgcatatttatggggataataaaagacaagatttgaaaccaggtctgctccaggagatcagagacttaatctcctatatctaaccttaggatgtgaattctatacactggacaaagatgaattttagagtcgtaaggtaatactgataattaagaatatgatagctctgataaccaattgtattaagaaaggatggtcaattacacaaagaaaagatgttagtatttcaggaaggagtttttttcttctaaaggagaaagcagagccgttggagtcatatctgggtttgcatgcaaattctaccacttaaaatccatggacaaaaagacactaactaaatcaccttggtaaaagcattaaatttatttgagtttcaatttccttatcagtaacagattaatgacacccaacttgtagacttattatgaagattagaaataatgcataaaattctggtatattgttaggtctaaataaatatatttcctggaaattgagagccaggtttctcttcaagatgaaaaaggagctgaaattatgcctgtcttccacatataaccaagatctatatttaaaagcaaataaaaaactaactactataaaacatggaaataaacattttccacatttacatttttaaccctaatttttccactaagtatattcagataggcaggttaaatataaattaagtactttttcaacatcagtttctaaaacagaaactttcaaaggattcctaatgtactttagtagtataaaagtgtcttttgttattatataagggaaacatagggtaatctgagactgtgtcatttttaaaaagctgttaagaaatgatcacctaacattttatggagagataccagaggtatttagtgaaatctcactaaaaagagactccctttttctatatctttaatgcttaatttccaagtggaaatattgtttttaatctaaatcttgagcattttagataagttgagaaattgtgtggtgagtggtttttgttttttatttctaatgaatcagtaattttgaccttcgttccatatgcctctttaatttatggtgaataagtaatactgatttttcaaaaattaatgcacaatctcaagcccccaagttttaaaattatgatatttccaatggcaaatgaaataacatgctgtccatgcagttagtgatttgaggcaatttgaacatcatgataagagagggagggaattacaagcagtgttataattaaaggtctgttgattcttcagtttaaatgccattgttgaaagatttttcactcagatgtcaaagtctgtggccagccaaaacttggcatgctagaactcagcccagggaaacattgtgttctacagatttaaaaaccaaaatctgttaagaacagaaatgttgggcttgggctgatttctcatgaatcagaaccagaacatagccaaataccacctcctctttatgaaaggaagtagtgcaggtggatgttaatgggaaatgtttgttcagatgggaaatgaagggaaattatcattagatatcatcatacagtgcactgggttagagttttatatcattaaagcatgtttctttgtgaaattaaaagcattttagacccctcttctattaaattcttcatgggtgttaagtggggagcagtatttacccatctttcaagatttgcacattgaggttcagtctctccacattacattccttgtgactaggaaaacttgaagtaaaactttatttgcttaactctctacctagaaatatatttccaaacaccgtcttgccctttctttaattagaaagttacaaatcagtggcctatgagctgcatctagctagcagatagaattttttaaaatgtatgtttggtccacagaatatttaaaataatttgagccaacctttaaggttaaagagatttcacaccaaaaaaaaactagatttttttttttttttttttttttttgcttctcttgaaaaattggagatctgacaacattagatctgcatccacatgtggcaccaatatctggaactgagtagcagctgctcacttcagacaaaccatgttctctccagtttgacaaagtccctatcaccccatattttatgccacacctacttcactcatttgctcttccaccctggctccttgaggcatttgacttttctttcattgcttgtggtcgttgtattaagtttcctcgcttgtggtattacctgttaaagtttccaaaattttcttttcattaaataatagcattgcaaagactatgcccaatgatactggacaaagaattattgaaaagaataaaagtcagaatgcaaccaaaatgtccaaaaataggtgattgtttaaattgtattttatgctggtatatccttagaatagaataccatgtaggattaaaaatgtttatcttgaaagaatgaatgcagattactaaactatgtatacatcaagattcctatgttgtaggagaagaatattcatacatatagaaaaagagctaaagtgatgtgtcaaagcagtatcagaaaaatatgtacatatacaaaaaatataaacaaataagtgaataagtaagtcccaagggcagcttttgtgggtccccttctacagggctttgttagtcccttttgacctaatggtttgaacatatgctaaagctattttttaattctctatcaaaacctgattttccttcttacctttattctttagagaatacaatgaagaataagatttctgtagttgttttaaatacttgagaaaagtattcttacttgcccacatgctacactgccactttggcaaagcaagagaaccagtttctgtgttggctttgagttagtttgttcttctaaagcaccttttggtgacataaaaaaatattcaaaactttaaaaaaaatcttggaacagaaaaaatacacataaacattgcacttaataacatgaccacaaaaactcttagaggctaggactgaaactcatcatcacaaaggcgtcagctttttgccaaccataggaaggagtgctcccaggtaaaagccatccaagcatttatggaaatttttctgatcccagcgtttagcacaataccttggagttaggaaatgctcaaaaatacttcctgaataaaatacaaataaattcacattcccaccaaggaataattaacctgcatataaaaattcagttatcttttgaattaaaatcaaaccataaagtttggatcttgctaactactctaaaaacttccagatatagttttgcttcagagttaataatgccaacatttttcctaggaaaaaataatgtttgtttatgtgtgtgattgtatgcatgcttgagtttagggaaagggtagaaagcaataagaggtggtcctttcaaagatgagtacagtgatgaagactctagctcttaaatatacctcttcctcacagcaatcctaggtatcctgtttatgatttgattgttttgactatctatctctaattcttgaagcatttgaagcattcttcacctttacactctatagcgtctgtttttatggttctcctgttcatctgaatgatctttcatccatcctccctttatctgcccacaaaatgtaagtttgtctgtctttctctcctcactgcattcttgaaatctgtggacagtttcatgaaatccacatagcttcaactagatgtttggagcacttccctagagatctaagtatctagtcctggcctgtagactctggtactgcacatgtgggtttcctgctgctcaatggacatttccacatgtttcacccacaacatctcaaactcctactgctatcctttgagtagtctagaagctagtcaaattgaccccagacacagtttgtgctttcctatcccttgctttgactctttctgtttcccttgcctaaaacctatctctccaatttctaattgttggaattttcccacattccaaagtccatctcaaacactgcctgcttcaggtaactttgtcagtgtccaccgctgaatagcaaatgatattcctcaagtcactgaaacctacagattttttttagcaacgctttacggtattaacttatttgcatcgtgttttagttatgtggtatttcttttctcccatgttctaaatattaggattattgcttctaatctttgtagctactttctagagcttaggtcctagcagagtcccttgctcacagcaggtgcttattaaatatatactgaattaaattggatttatgtattgatggttgcgcattgcacatgtgttgtgatttgggagacccaaaacatccacctgcccaaactatctcttccattttccaggccatagtatcttgctttgggacgttctcttgtacaaatgtgaggaatttccacaaatttagtcttttgttcccaagctaagtacactattggctgggtaacatgtgagttctgctacttgttatctcctaagagggagcaaagtcttaaaaaagaataggccaaagttcagatatgttctcatggaggcaacagataggaaaaggtccatgaaaaagacaggatcacagataggaacttggactgtgccacttattagttgtgtgccttgcttgtctcatctgtaaaactagatgataataataatgatgcctaccttagatgttatgagaacaaagtaacggggtgtgaagtgcttacaataatattaggcacattgtgttagtgagggttgactattattagttacatatgtcatacatatatgggatatatatagtgtatatgtactcatatattaagtatactctttctcccctcactgcattcttgaaatctacatagctgcaactagatatttggatcacttccctagagatctaagtatctagtcctggcctgtagactctggtactccagatgtgagtttcctgcatatatatatatatgcttaaaacataatgcacacacacaaatgtacatacatgtatttgttaattattgtcgcaaaggaaatcctggatactcagagaccttaaatgtctgaagattgaggatgtataagagaagagatgagactctgtcacacagacctgaggtaaagctcagctctgccacagggaatacctgtcttttatatttgttttaaagattaaatggccgtgtcatgagcataatcatcctaacattggactttggacctccttcttttggtgattcctatccctttcttttctttctttcttttttttttttaagacagaatctcactctgtcactcaggctggagtgcaatggtgcgatctcggctcactgcaacctccggctcctgggttcaagcgattctcctgcctcagactcctgagtagctgggattacaggcgtgtgccaccatgcctggctaatttttgtatttttagtagaaacggggtttcatcatattggccaggctggtcttgaattcctgacctcaggtgatccacccgcctcggcctcccaaagtgctgggattacaggcatgagccaccgcacctggcccctatcctttttctgaactacacatttgttttcttgacaaattagatttcagacttttgttctggaccaaacttagaagaaacaggtggtactgtttcagaaaaatggtgtcagtacaagctaatgatttcaaattattaataatttaatacagtagtgaaatgttaaaatatgtacgaattaatatgcaccaagcctaacagagaacaaacactcaccaaactgtagctaaatccttaatctagaacaaacttaccagtcagaccaggttttataaaaaataaaatatctcttacctatggaaataattaattatattacagattttacaactggcttttttttttttaagtacaagaatttaggtttttacctaaaaacaaaacagtcctttccacttagttctatttgaagggagtgtgtgggggttgggggagaaggaaaaacgaaggggaaaaaaagtcttgagaacatctacaaactcctggatattcagagctgaaagaaaaagaaccttgtaatgtaccttcttgcatttagtcctgttattgtagtgctgtgatgtggcactcaatgctctaggggacctagagcaagtgttacaaatgcaaccaaaagtctcatgaaaatgagcctcttaacagtgtgtgagctggtctacaatggcctcaggaaatccccccagctattcatgtcctttttatccactacattctctgactcaaagggaaacctcccttcacctccttgaccagaattgagcagacattgatttggttacctagagctttatttattcatttattagtctttatcatttgtattccactagaacaaaagaatatatcttttctttgcattaatctaagtttaaagatgtgcaaatgtgtttgtgggagagtgcatatttatgtttacgtaattttatgggtagctggctttaatttaaaatattttctgtcaaaaccatagtacatagagcctccccatcaccatcactgtgcagaatgactgtacttgacacataagctgaattcctaaaattgtttcacgtaaagtgcgccttttaaaagagatcatgtttttctattcacttctataattagattgagtgtcacacaggaaaaataagtggcccaatgtatatgtttttttaaaaaaattaagaatcacaactttcacctcagtgataatgatgcatttatctatggacactttatgtgcataaattgccccccaagaaaagccaataaaaagtgaatataattaaacagcagatagtttgaaagcaaatgctacttgtaaaccactgtactgaaggcagcgggaaatttggagatgtgtaaatcaggaattgtcctcagggagcatatagtctagttaaggatgcatagcagaaaaggtagaattgtatgcacaattaaagattcaaatagcagttcaatatattcagagatattcttcgcacaattatattaatgacttatgttgaaattataccatgtagttaatttcccttccattttagaggacttactgagtaccacatactatgacaactatctaaataacaacaatgcattatgagctcttcacatgaattcaacttaggcgaaattcaattttggttaacaaagtttgggcaattcaagcaataataatttgttttgaggtagactacatgttcctgttcttttaaatgttaatgcacagtagctttgttacagatttccttcaggaatgcttgttgaactagtggacatttctaagcagattttttatattaagcaatcaagaaaaagcctttgaagatattttcactccctcaataccagcttcggatgctatgttttcttcagtgttatagtactgaatttgttcttacttagggaatatgttcaaagttgagttggccagaatggaaacattgtaaattctgcagcagtgtctatttcatgtataaactaatcatgatcaaaatagagatcctatagggacctaaaggaaattaacatccttagttaccaccttagctgtaacctgaaaaagggattaatgtaagttcagggggaaaccttggaggcatatacaacgtagatgtctaaaaatattcaagctaccgtacccaatatgtctgtatatatctttactctcctgctaaagagtaaataataacaacatcagtaacaccaaccgaatgagattcttagtttacaaagcattttggatacatcatccattttgatcttcagaacaatttgtaagattggtaaggcacatattattcatattttacaaatgaaaaatctatgaaatgtaaaaggacagatgacttgcttaaggacacagagctcttaaaaggtgcagctgcatctcctgatgcaccagtgtgactggctcagaggaaacagcaacccaaacagaatctttgctacacaactgtcctgcaaggcacagaggggttgccaaaaggtgacgtgcagacattagtcttcagaggaaggacgagtcctcaggccaagaggcatacgtcactattatttcatgaaagaaggaaaagacatggttagctctcttatgaggtggttttctccacatatatagagctgttgagaaatactgcaaattttcattactcagagattggataaaattctgatgattttccatgaaaatcatagttgtgtctaatctggttgcatctgagttcccttcaacctactaagagtttggacttgaacctctaaaaagatctcagtcctgatcaggaccatccttcccacctaccaggatatacatattttctattgaaaaaatatgtgaccataatcaattgttgagcgagctccctggagcttcttacttatttgagaatatggtatggaaatgcaagagatcatgggccactttactaaaactgagtgtcattggaaattgataaaaaattgtggttctgaatcccacaagccatagactttcactggcatacagaattcaaagctgtcactaaattctgctacctgataaatagaaaggtagactttcaaatcaagaaatttagcacttggttctagagactaataatgccagcagatcctccattcagcatcacaccctttaaacatctacagacttccagcctttattttggcctggagaattggacatctggagcttcttgaactttttttcagtattactacctgggagccctagttaatatgaaatatcaaggcaatatcaccaacaatgtggtcctaggatacttgcaatccaaattgatgtttcttctacaataataaccctgaggttgtaaagtgttttcatatgcatgatcttgttaacttctacattaacttttcacataaagcaatttattattattattaattattattatttccatcttacagatgagacaaatagactaagaacataatctaaagtcacatagctggcaaatgacagagtcaccatgacacctagattagcaggtgatctcactctgagtccaacgtgttttttcattagccttgatgagcctcacagatttgtcctatgacaattgttctcagctaggctttagaattacctaaagggcttgttaaaatatacacactcagacatccacctctgagcatctgattcagtaggtctagaataagacacaataagttacgtgtctaacaagtttctaggcaatgctgatgctgctggcccaaggactactcttttaggagcactatcctatagaatgtaagcggtaactgaatggcaatgatacactatggcaaaagagtcttattaaagtttggataggggctgggcgcagtggctcacacctgtaatccagcactttaggaggcccaagtgggaggaccatttgaggccaggagtttgagaccagcctgagcaacatagcaaaacctcatcactacaaaaatttaaaaattagcctggcatggtggcacacacctgtggtcacacccagctactctggatgctgaggctggaggattccttgagctcaggtggttgaggttgcagtgagctgtgatcacaccaccagtgcactccagcctcggtgacagagcaagaccctgtctcaaaaaaaaagaggggggggggaggagattgttttgtttgttttttgcctaagctgcctcatgcttcttttttctgacctctgttaagaaagctcagaaaaaaatgtggggtgggggtctagcaagagagcactcacttctgaatgagttcaggtctctggcactcaagaaatggacactgaaacccttctctttgcttctaactagaactactgttgtagattaacttggagatacaattgccaaaccaccagtgaagagttactataagacaggaggtgggcaaatgtgattagatggatctgcagccaactgatcaattaaccaataatcattagattgattgctttatgtcaacttagaaggaagctcttagtgtcaggagaaaagaccctccttgacttatcctagtcaatatttttctgaagactggtaagggttcttgtatcacaagctcagtttgaaccagtaaggtaatatatctgctaaaataattttttaaagagctaagaaatatttcaactgtgttgaaagattatgtccagatcaaggtagctgatggtccctgtgttaatttcctatggctgttataacaaattaccacaagcttggtggtttaaaacaatgcaaatgtattctcttacagttctgaaaccagaagtctcaaatcagtttcactgtactaaagtaaaggtgttgggagggctggttccttttagcggctataaaggaggatccatttatttgccttttctatcttttggaggaccctgcactccttggtgcatgaccccttcttcaaataaccccaacctcttgtttctgtcatcacatctgctaactctgatcctcctgcctctctcttataagaacctttgtgattacagttagagtccacctagaaaatccaggataatctcctcattttaatagccttaatttaatcatatttgcaagacccctttgccacgtaaggtaacattcaaaggttctggggattaggacatggatatcttttggggggggccattcctcagcctactatagttcctttgtagtgtgtttatcagactacattaggaatattgtacccctttatcagcaccagaatttaagagttccgtcagtaaaatatgtccaaaaaagaggggatctggagtcaagagtataaaagccatctttcaaagtatgagtgagaagagtgtggaaccagggacagacagactgggttccagcactagttcacttctaccaagtttttttaccttaagcttgtcagataaaatatctctgccactcagctcttctctgtaaactgagagaaccagagaatttcctaaataccttctgcttgtataaaatctgtcaggctgttcctaaatggcatttaaaaaccaagtgcttactatctctaatattcaggataaatcttgtccacttttcttttgaattcaaaattcacctaaattttgaatttaaaacatgttttctaagtacttcttgctataaaaatagtggcgatactatgaaaataaccaaaacaagtgcttttcactagctaattcttaaatactataccctccaatattattttctgaacatcaaatcactaatcttaggataaagtatgccccttttacatgttgaaaacttgacacacagagagaaaaatttgtatttactcataaagaacaaagggaattaaaatttgttgcttccagcttttctgggagatcatctaccaccatggcaggtgtgatgctggacaatacattaaatatacaaggtagaatggaaagaccttgtcctggaagagctcagtcttaaggaatgagtaactaaccagagggcagtcactgagagactgctatcattattacaggggtcaaacaggtgggaaagggctgttttatatatttattgtggcttgttctcagataagagcatgggacttgaccactggttctcaaaaggaaatatggactagtttgatacaaatctctctatagcatgagggttatcttatgaacaccaactttaaatgatattttacagagcgctacaaaaaataacttggaggaagtttataagaaggaaggcttcaagagctgaaccagaaaaaaaggtgcttgaaagtaaatcaaattatgagatacgttgaattatggcatttattattatgtgcagaatatgcatggaattttgaactaaaagctgaaggagcaaagatctagaaaccttcctgcataataaataaattaaccctttattctcttattttccacactccctatatttgatgacttattcatacaaatgtacactaaaaaggcctaataaactatggtctaccatgggtgcatttacctatttgtgtacatgttttaagcatatttttctgggagtgtttctttagtataatgcaggcacagtatttcaaaggccaagaattctttggaaaaaggaaaaggagttgtgtctgtttatgactgtcaaactttcctaagcttattaaattaggatatgttgtccttttctttcataatttgaagattattctagtgatatgtttggagataaaaaaaaaaaacctgtcaagtaagtcagagctaataaatgggttaataattcactgaaaacccgtacgttcagtatgctctaccactcaggacttagtctcattttctactctaaaatatcgaagttttcattggtatttttttatactggaaactacatagtgtaagaaaatcagcttatcatgagcaggtcatcagctctggaaatatctgcccatgagaaaaaaatgtgattggaattctgtcaccaaggaaatgttttaaaaatctgtttcattgccaaacaaaaagcttcaactagttatctttattttacaatgactttaattcttttgcccattcatttattacatagctactatacactgatcatttagaaaaaaaagcaccctaaatgattatgcaaaccttaaatataactatatgtttgtgtgtattcgtatgcttttttaaagagcacatttgtgacaggaagtgaagaatggcatagtcgggggaaaattaaagagacacgatgtaattatccgaactggaattaagccaattaataacccttgtgctaacactgtcctcaaagtgctgaaaatgccgtcagatatttaaatgccctgggtggtcatggtcagcactcttcccttcatccattttcagcaccatgcagggacatggctcaccctggtttctgacaaaggactacacctgaagtgagctacagaagaaggacagattctataattcgaaaacaagattctctcaagtggttttggacagattattactgatctccaatgaaataaaaattctagtgttttttttatttgcttattcattcaacacacattgactgaatacctactgtgtgccagtttagtaccatggctgagaatgcgggctttaaaatcagattggctggatttaattcccagctcctcacttgctaggcgtgtgatcttgagcaagttacacaatctttctatacctcagttttcttttctatgaaatgcggatattggtagtacctcattcataggattcttgtgatgctaaagtatgattttaaaatgtaaagtccttagcagactgcttagggaaagccaattagtaatatgttggccatcattattattatgagccaggaaatatagtaaaatctgggaacaaagaaataatacaaccccagatgacctaacatccttgaagtttagattttaggaatttagttctaaactttataatctctactgccaatcctttctagtagagatctgtatattagatccttgctttgctatatgctttcatgtcttgaacctacatgctttgaatataacacactcagcacatccataatatacacttttgtttacacaccttcctccataataactaccgtgtaatgactagctgtgtactttatatgtttcctcatgtcatccttaagacaactctatgggaccaatatcatcaccttttacagaaaggaaaactgaggctttcagagtagctgtgacttttgcagtgttatatataaatatgtgtttgctccaaagctcttgttcttttttctcagttcaccaacagacatttactaagcactccactgctttcttctgggctctggcctatcaggtattttggggcttgccaaaggatctgccattatcaaaatcactgattccttccccctttccaaatcagtcaactgtaggccgtgtgttttaggcatggcatagcagccattgttaaagaggttggtgtgcaaataaactaaattactctggctatgacttctctcagattacttgtctttgagtgggctcccacgtgcctgacatttctttcggttttcttctttctccctaagtagcaatgttgttgctgaagcatgactgagagatagttttcggtttcatacacatcctgagtcttgttttagggcaagaaacttaatctctccagtaacatctgatggcactgttctcttcataagcacctctttcaccatttaaaaactggaccttcaattacccattgtcaaaagggaatccttagtgaacatgatcatatgtgtcccgaaaaagataccatcactttcatgggcggaaaatatagtttcccctttttagtagctcattttcaattgaaatatattggaaaggttgtacatacctaattctccaggtggaaaatctcatcagtgctttaaaactacatagtatgctgaaagactcaatctctttcacccacaatgtgcctatattttagaaacgaggtgtatgagaaaaaccacatcttctcacttggtgatatatagcagatgatgttcatagagcgaattgtaaattcagggtgaggtctttgtagatcaaaccactagccttcattagcttgaaaatgtgacacaagttatatcttgctgagacgaggcctctacaatattatatttttctgcttttctcctagaatgaattaaagacttaaatcccttgttcctagcattcaaaatggtctctctctctctctctccatatatatatatatacataaacacacatatatataaagtggaaatgtatttatatatgtaattatatttccatttggctatttaaacattttgagaaattggaggtttgtgcactaactatataggtggagtaatattcttatttgggaggtaagggtgattttcatacctgttgggccagatcttcaaagaatactctaggttagctggtgtggtggaaagagcactggcctggtgggctcctggagtcctagtgtctagtgtcgactctgggcctcagtttcctctctactaaattgggagggggagagattgatctctggggctttttctagctctgtattctctgggtctgcaaatcgccttcagtgtctgccttgccagctctgtttgtcacaaagattaatccattttaactgtaccttggagtgcacccgggagaggaggatggatggattgttttgtacctaatattgcatcagaacttttgcctttttagatgagatcatgccgtgcctaaaatctgtctgcctatctgcccactgactttgtctgtgctgatctcttgccacggtgcctcttcttccagcatccttctccctccaagatctagattcggcatctgactgtacctgtcttgttctctgcagcatctgtctgctacactcctagaccatcgttaataaactttcacacattacacgaaaacccctaatatgttggcacctgcacataaatatctatggttcataaaactagaggagaaaactccattttttaaagacctctatctagtgccatttgtatttgcactttttgtttagttgtaagttttaatagttccccctttgaggatttgtcagtacgagcagtattgcttatcagaacacaccaacagtctttttgtaatattcgcttttcccctttggttcagccgagcctgctgacagatcattcaaattcaattgttttatgtctaagccgaacagctaattaaagtagggatgattaacctgactggcagtgccgctctccctctcgcgctctctctccttctccttttctctctctctccctcctgttccaatcagtctttttctcacacactctctctctccgtctctcctctctctccctctctctctctctctcccccccctctctctcttccccctctctcttcctctctctcagtctctctctccctccctcggttggtgtctctctctctctctctctctctctgtctcttgctctactgtttttttttcctctctctctctcctaaacgtggtctgcttgctgatggcagaatggcactcggagatttgtgcattgtgtctggtttcctacgggcaggctgacccagtgcctccagggacttatcaatagaccactcagaagagacacagacaggagagaggaggaggggtggggggagagagagagaatcaatatcaagaatagaaggagctccgaagccattttttttttaaagaagtatcgggacttgggagagggtgacaaagaaggtttttcaaagaggcagtggaggaggttctaataaatttggaaggaaacagttccctgtcttgggaaaaggagaactcctgactgattagcattcacaccaggtatgagatgttcgctaccccttatcactgtgtcgcaaccgagatggaaaagcctttttttttttttaggagaccgagggagcatgtattttgctgtgtttgttgttggggggtaagaggggcggcgtgagaagctgtgggcatttgtgtatgagagcagaaagaatggaagcagtacaacggggggtgggaaagagtatggagtatgttactgtcttccctgtctttgtgcacccctggggggttacccaagttcatttctagcaggtggatttagacgggagttacttaacgcttgaccgccagttttgaaaaaaaagaaagaaaaaaacgctgcttcctatgtctattaaaggaagctccaatttctctctctctctctctctctctctctctcccttctcttttcctctctcttcctctctctcttcctctctctctgccccccatccctcttcccctctctccctctccctctctcttctttttttcctcttctaaccagacagcgggagggtttctggctcccagccagcccaaaagcctctaagtgttttgcacttgtttcagggagtagctgcccggggatttttcagcattttcactagagaacaaagagttctttacaaagggaagggtgggggggggggagtgagcttaatgtctgatatatgtttttctatttttattagtttttcgcctaaaaagaaagagacaggaacagaacattcactctataaagacacaaagacattcaaaagaaatccagttatcttttctccccatcatcccaatatatacatatatgtacatgaaaaaattaaaaagaaaaagactagttaagttgcatatgttgctcttttctcctcttttaatctttccaaatccaactgttcttatgctcactttatgctattttttttctactcacaataaaagttgttcaggatgcatcttctcttatcatgtctttaccctttctgggtcgccaaaatcttgtggaagaaagaacaaaagtccatcaaataatcaatttggtgactagaacatcttctacttttgccacttgggtaaaaagttaattatggaatttgggttcccaaaataccaatggggtacatcagttcattcgatctcacaagtttttgcatccatctgtttaaaaggtaccacttgtgtcacttgtcagttattaagaaaaggtagtaagggagcagatatttgtattttatttttgtttctaattatgtaaatgacaaaacccccagagagatttcttgccccttctatgatacactagttcatgcaaaatatagtctagatggagattttgtcaacgattctgattgccacgtagctttgtgttctccatttcaatttttgcctatgcatgtatatttttaccatgaatttgtgttgtagcaaacatttcagaatgcttatcattttcaaattaatgctccaacaaaagcaaaaagaaatcagatgtgagctgtatgtgtaaaatgtagtaaacaattttatcttttatatatgctgtacatttatatctttatgctaatatcctggatttgtaaacccaagataatgttttctttcttaaagttctcttaatgcatttatatgttgattgtcacttagaaatctttttaaggtacattatagacacgaaactaaacaaggggaacaattctcaagctctacaaaaatccttaaatatatattatgtaccattcctaactacagataactgttttgctaagtagaaaacagctacaacagttgtttcaagaatcagaaactcttttcttttttttctattaactgaaaataaaatctattcatatccctggggagggaaaatgtaggggaaaatatagatatatacattttccataattatagaatgcatttatgtaactgcttcttaagggtgtaatacatatcagggcagagtgtgatgctcatcaaaaaaccctcctggctgggaggtgtgagtgccttatgtttgaagtaacttgataacaaggagtcttttcgggaaaccttactatgtatgtgttgcctcagtaatgatcctcagataaaaaacaagtactaggtggccagtgttagcacttgaactcactgaaagatattagaagtaggggaacttttggcaaatccagaattttccagggtaactcacttcttacacttacatgttttctttaggaatattcttgaattgctttcagacttttctgtatttttgtagaattttttaatgcttttaatagtgcttaaggagaaaaatacttttaaaaagaatgtcatccaaataagagaaactcagtctttaaaaagttttatattgaagacaagagttgttttggttttgcttttttcctttttgcttgtgttctattttttctccctgaattcttttgttgctgtgggctgttgtccctgcatttttaatttttcatttggtacccccccttttttttcttttttctttttctttttggtctgtttttgatgtgaccaaggggatctttgaaaggggcagagggactgggataacaggctgttactgaaagctgcactagctcttcttgatcccaactcaggcagctcctatcagctagttgtgccgccaagagtacagtgacaggtgatagctgtcattctgggattcttcgtggatctgacctgagagtgacacattcacagtcgaggagaaaagggaaaaaaaatagaggaggaggaaagaaaagctctttgagctggaatacactggccctttcttcctgtaggcaatccgctccagttcttggcgacgtgtcctgcactatcagatatcatatgactttttatttagattccttttcggagaatggcctgttaggactctgtttgttttcttttatttaatttccttctcccctcacccactagttttgcgtatctgtgtgtgtcatagcgtgtgtgcgcacatgcatatgtgtgtgcaatttttatctttgtttttgttctgttgatctgatgctttatttaaagacaaagctttaattatttcagtatactggtttaattatttgccaaaaagaaacctcattctaggctttttggggggtccatttttaaacacatccattaacacatgaggctggagatcctatatgcttgttggtctgcccttggcccactccctcaccttaatttaaccctccccttcatcagcatgcacagcagtataagttaggaaacacctgtgctgagttgagagagaaataaaagtagaagcaacttcttcaaatttgcactcctagtttcactttaataaactttttttaatcgttgattttttttttttttttttggcatcctctgttaagcttgaaagcatcagagatagtgaacgatgtgtctgtggagcttttgtgaggccagctgagcacccttggaaagtagagcaggagctgaaattcattcagagacttaagaattaagtaagagatttaaataagatctgtgagatctgtgagctgttcagggtttggtgatagatggtaaaatggaatgcttagggatattcaaggaagagaaagaaattttcaaccaggaacgaaacaggcatttctactgcaattcatactttaaaaaccttcttttatcaaatttttattttatatatctcaaaatttaatcaattggtatgattgccttcttttccacgcttgctatgaaaaacagatgaattgtgccgatgttattactgggtttctcctaaatttttgttgtatttctttttcggctttagagagttctgattttagttagcaaaagaaaaataaaacttctctaggtatgcatatggttgtatacacattattcttatctacatataatatatcctgtttgtatcaggatataatttttgtatagttacatgcaagactgccttgaaagttcagatgaccattacattctttaaacccatagtttttagtttcttgttagtttctctaaaattattttttacagaccttaaatttgtaatgccttatcatagccagaggtgaattttgttgaaacttggagaaaaatttattccacccctttaagcgtacccaaaagggaagagagaactatttttcgttcaacaaaaaattttaaaagccttttttccttcagcggaaaactccaaaacagctttgtctcagaacgttaaacttggcatggataaaaaaatttgagttttgctttgtttgaggaaatttgtttttgaaacaacaatgttataaatatttttaaattgcctgctgagcatgcgctgtatctgactttattcatagttttaaacacacaccaaagtgcagtcttctgaatggccacaggtaaggctgttgatttgtatgatctttcgcagaggcaccttctgtgagtctactcagttttccagaagggaaaaaggcgagagctgagtttagacctggacacctttctaaatatcatagagcaaaagtaaattgccccattaaggcttgcacattacacttagggtaagtactgttcaactttccttttttataggagttgcctgccttaacttttcagcttaatacgagcagcgtaaattaagaaaaaaaattaactcaatcagttatttcactgaaatagaaaatttgcagattttaaagggtatctattgtgcataaatttggggatacgagaatttgccagtgaaatgatagcagctctgtgcttacagagcaaagatgtgctagtctgaacatgcctgatctcatctggaatcgaaagctaaatctaggtgggcctgtaataataccagaaaaggaacacatgtatcttttgtgcaaccttttttttttttttttttttaaagctaggcttccaaagggaatgacaaagaagcaggttctcctcttgcttaataagtagtcatagtttgcctctggagatatgtatttccagttgttttagttgttttgttttgttttgttttgttgttgtcatcgctatcgaagaatattctttcctgtcagtgattattaacactttccgtttttcagaatgctttaactctgtttgatgtttcctcacttggttacctttctcaagtctgcgatgaccctctcaggctttgccattcttatcgattcttaccagaatgtacttactcattagctgttttgttatagttatggtggagataatcttgtttttcaggcttttataactaaccaaacaaattaccttttgaggtgaaatttctcatagttatccttgacacagaactgaacttgtcttgaaaaggcttgaagaaaatccaattagccgttttttgagaactgaatattctaataaatgcaaatggattattttacaaaatacttattgatgtgcaatgcttttctaatctgtttttcttttcgtgctttaaaacagaccctgaaaattaaatgtattaaaaagaaagaaagaaaaagaaagaaacctgccaggttaatactgatattttaaatacccaatttaaaataatgctcaaagtttgaatttctttgcaacatatcacctttcagtgtcagtcagtaatacctgggcaggtatatatatacattcacacccacagggaaacatgaatccactttacagttacattaattctattttaacctacaagagaaaaggttagcattactgtaaaacttttgttaattcattatattttatttttctgtaataaaaaattcactgaactattgctttcatccaattatatatatacttaacacccatttatattcaaatattttatcttaatttatgaagtatttttataagtcttatatgctgctgaattttatgcagctatatgaacgtttaagttttttctgatacaatttgctttgttccgaatctgttactgtgttagaagtttttttctttcccaatctagaaagagtatggccatcttttcctatatgtgatatctatacatcttcagtattctgaagaagagattttttaacctgcaatctcttggaaagctttcaaacaagtgggagaagtaatctttactttgcttctccttgatccatctgtttgccctcactgtaccacccgtcaccaccagcaaccctgaaaaaaacaacagtaataaatatgatacgataatttttctgatcacagaaccaggaaataccagagaaaattgtggcatatgtaggaaaatgccaagagcttctccagtaagatcagctgtttttatactttttttttttcctcttgaattttgtttgtgacttttttggcttgctgaagcacatccccataatcttacgaagccacagcaaattcccaatgccacaacaatactgtgcagccggggagaggccagaagagctgatcctgggtggctgcaggcttccccagcaatggtgcaaggcaggaggagtaagtaggctactcttcttttcccttcttacctaggctgcccaacctgccagctagagattttctttctgtagctttctcttcaactgtctgagacatttccttcaacaaccaatgactttctacttccaagggatggttcatatagcaaaacatccatttttattttatattgcaacatggaaagctttgaaattggaggggcaaaggaaaggggctcagggtatccgagaaatatcccaaatggcattaggctcaaagctgtttttcatggttgctcaggtctataactttcctgttccctccagagcctctaagtggttgaaagtagtgaatgggataactatagggtacacactatgatctaactgattcagtagatggagctcttctccttaagtctgtatttaaattaacgtcccactctagtttgtggggctctctcttttaaggtgtgtcatactacacacataaaattgaggcctgcatagctagagaagagatttcctggcgcttttcaagagacatgaagcatttgttctgaaatgcaaacagtgcaggggagcactagggtggggtgggaagggaaatggagtttacctatctaaatttctctctgtgtttgttgatattcttaagtgtgaaattaaatcctagcagttattgtggaatacacttattcattagctaatttgtaaatgtagaaaaatatattgcacatgcaggattttggtgatattcattgcaaatcttccaagctatctgaactgtgcagatctcctttcatttaattctacaaaagcatcttaatactgtaatgcagttgtttcatctaattagtctagagtacctgaataaaatgttacaagttctgaattgtgacagcacagtggagggcaaagtagtgtgttagtaaggtgcctttgtggaagccaaaatattttcagcaataactgaaaatagatttccagtatctgttttaatgggggaagagctacttgtttatttctttttaaattaattgaaatgaataattgccacagaatttttgtcattgttacattgttttcagtaccaatagaataagtttgatcatgtctcttcctggtaccaagtggagaaatatatgtacactgtatgtaataaattatcttccttagtggaatgtcttctcacagattggagatattactgaatatctcttgttaaatcttgataagatcatttggccaaagtagaactggtcttggctttagtaccaaaagaaatagcatttttaaaagacttggatttcctttgcataccacgtgtctgagtttgatacagtccaggaaaatagagaggatgagatgaaattattcctaagcagccgccgtaggccaaacactgaaacagtgccaacctggaccaatcaggccggcttctcagaagatacatgcttttgtcaaacacttacatgaagaaagagagagaggaagttcgtgaaactgtatttgtatgaatattcttcactgatttcaataaagtccagggtaataaattcgatgatttttattcttttgtaaagcagaaaatctgagtttttctgggcagctaaggttctctaaatgttgtactgtgacatcttttaaacaaaactatcctttcgaatttaagcagtgcaaaacttctcacaaagagcaaagagtaaaattgatggaaactcagaatcaattccaaacccatttctggcatgatgagaataacatttgtgctgtgtttaaagtagtttaaaacaagaaaatgataaaatgatcaatatacttaaagccaaaaataaccaggagagaacaatctgtaatccattctcagtctgaaaccccacactacttatttattgaacatgaaaataaacaactatatattttataaggtggccctgcaaaccttataacatataaacagtaatgatgagatgccaggctttcaaccctttatttaagctatgtgtttagaatttagtcaggcaaaaactcctggacttaaactattatacatttatttgtttctacataccatgaccataaaaagaacaaacgttaaggaatatatagattgtcgcagtgaactacattgccaccttacagtttatgtactctgtttgttttaaaaagaaaaaaaggttttaactacagcaaaagaatattttaagttagaaagtcagttaattgatcaatatagaacagatttaatatttctttaaaaataccttgactcctgactaatttattaaattcaacacatacataaatgtaaaccatatatattttatacttattgctttaatggattgctttaaaagactaacttgacactaataaattttgaacctgtggattcaaggtcagtgaatgctgctgtccaagtttacaaaaatctctctagacttaagattttgctctaataaataattttcttaccaatttttcagaggcacttaactggatatatatttatcgatcagataaaataaaattgtccatctagatttttaaaattccagctgaagaacttaaaataacaacaaattgcataggcacacaatttcattgcactgaggtgctgtaggaatgatgataattctaatgagcactgtgacgaatgcaactacaatgaaacatgtttgattacatcagtaagagtgaactcagtgggcaaggtcagaagggtgagacatagaagtcatgactgagtgggggctaatgattaaagttatgggagctatttaaagccctatagctgggtgcaaaattaacagatatggaaaataagagtcaatcaattctaaatatggacagtactttttcctataggttataattaactgtagaatttactattgcaaggatttataacaacatcataagctttggttgtccagtgtgatagtagatgtaaagagctgttatgcacatctgcttaaagatttatgtaagtgtaattgttatagcaacttgttatgctattgtttgaagtttaaaagctctgctttaagcgttgacaaagcaaatgtcagcatcagagcatcataatcactgtatcttggagcttgaaggggctttagatatctcaatatgggtgagtgggttaaccaactcttcagaatggaatattggaatatctggtcgaggaccatgtagaatttgaaaatacatatatattacaatgttttatatttggaaaacaaaatttacgagaaaaacttaacaaaatagagaaagtaaagctctacaaaattatctggactaatggtactatatattgcattctgtgaaccaggaattttaaatagagaagaatagaaggatctacattaaaacaaggttttatttttatcaaaaaaaatttgatgagggggttgtccaacagattaagaaatgatattcaggcttaaactactcattttgccaataagaaaacttaaacacagagaagagataaaatgctttcaagatgagcaaggcaaaactgggaccagaactcaagttttctaactcacgttttcttgatgtactcctatgccaaaaggctgaccactaaaactaatttataaaaataaaaagtaagtgatatcccactttgaagaagtggaagaaaccagaccctcagggtttctatttctatgccagtaacctcacctcggatgtggcagggacaaatatgtgtgatgaggataaggcattctgaggaatgaaggaaaatgcacccaaatgcattgtactccctagagactctggagttaacactgctgcccagacctccatagccttgtatctcacattttttctccctctatcgccaccaaaaaataaataacaagaaaagttttgagaaattgtagtcagaagatcttttggaaagaagtatttctttgtagaaatattcctgtacagattggtatattttactatcttatcaaagtatgagttctaatgagacattgatgattcaacaggtttataacattacaaactggaacaatccttgtttcctaagcacacaccacattttcccatccatgttccttttctcctagtattcccaaatagaaacacattctgcctcctttatttctacaacactttgtatcttttaatgagccttgccatatttcattttatatgcaagctatttatgtatttatttgtaatgtaaagaacaggtctacataattttaggcaatgtacttaattttactgggcctcacgttccacgtctgtaaagagaaaaacgatatctgccttcctaggatactataagaattccatgaaatgtagtatataaagtgcttagcagaatgactagctcaaggttatcactcatcattgttgttattgttattgctactattacttattaatattcccctgcctctgattctttcccatttatatacttctcgaggtcatagattgacctaattcattgtcttctcatgcaatgaacacaatgatttttgtgtaacaggaacctaataaaaatatattgaatctttttataaaagtccatattggacctattatttccctacaaagatccttaaatcctgtcctggaagtttaaaatagtggtggttatggccagtgcctgacccacatacattgtaaaatgcagtggtgttgcttgctgtggactgtcagagccacatgatttttcaggttccccacagacccccaacagcttaagactgctctttgcagcatccccagaagtgtcagcttatatttctggttcatgtgattaatgagcttgttacacctctgtctgtagcctaaactagaaactttcactttggagagcaggtcaagatatcgaatttaattttggttgcatctgttataagccaattgtgtattcattacatttatagattccctcttcagccatatattttcatggctgttgagagcacctgaatctgtgttgaatgtccttagattttactttggagacctgaaaatgagacagtgagatctttttgatagctagctgtcatctttggcattttcttccctttagtgtgtaatctggtctaaatttgaagaagagggcaagtatagcatttttatctagcttgaatatggcatggtaattctgtattaatgaggtcaatggtaaatgcagttcagctacacatttctgtttttccagacatacaaacacattctgtggaaatagaaaatgtctaaaaaatggaaatgatgaaataacttgagacatgtaagggtagagatataacattaaatgtatgggtttagcaagcagagcaacatacaaagtggactctgagtatgtatggatcttgccagtccttcaaggtttcagtggatagcaagaaaacgaaaaagaggtagatcacatgaacatggcagaagagagactgacagcagggtgtgctcaagtcagaaggaatgttacattttaatcagccagaagttccatttatttgagaataagctggtatttgtgaggggaacaaggtcacatttagtagaactgataattcaataaaggattttgactttgccagagtaatggtgttggcatcaagagaagaaagttttgcagatttctgtgtgtgcacttgctgttactggtgttcctggtgggtggctgaatcatcctgatggcattcaacaggaaccagctgctgagaatattaaaatgcaagcatttattcctctagagagacagtagcatctgcaaagttttcctatcttgatagtacagataatcccagggagcattctctagtagttttcactctctattcatttatacattttctttttatcattagcattaatatctcaagttctaaatgaagagaagagtgcctgagtcctgagtccacaacaggctgtagagatggatagttaacacttggccaagaacttggtattgcctcttgggctttaccttgaattgttatctaaaagggggaaactgacatttccctcccttggcctgtcttcaaagcaaagagtcatccatactcctagtcttcagcgagctccatcagtgtaaatcctgcccccaacaacccccaccaaacacgagctttggagcttttcactttacttataaaatttgtaaatttgttgctttccttgtgtgtttgtattttatttgtttgtttggtttattttgttttgttggtggttttttttgttttggttttggtttggattttttgagctaccatcaacagttaggggaaagggagttacaaaaaggaggtttggactctgtaatcttccaggtctttccatctctaatatttatgaataatgtattgaactgatggaaaaaatgttgaatatgttcattatgaattatattcaccggtgtgttgcctagaatataaaagagcaaagcagttgccgcgtaagtggttgcttacaataaatgtagtggtacaacagagctctgtatcccttctcattccaccgcgcgtcgtccccaaacacacgctttacatgtctgagtggcaactgcagatgaggtgcttgatgggatgacagccagccaaggttctgacgggtacagggacattcgtagtgcagtgggtcttaaacagaagcagccttgatgaaggttttgatagtgcagtttccttcaggagaaatcaccgaagccagtttcacatagcaaacattactcaagtgctttcatgctgcaggggttataactcctattaggagaattgaaacttataattttgcccctgatttttaaaaaacagcatgaataactaatttgtcagcaatgttacattctaaatgagccggagtggcagaaaattcagaactatttattatatttagcttcaaaattcattatatacttgtctctgttggtttttcttcataattatgttttgtttagaatttatcaaaataaaattgtattttctaagcatttaccagatgacattgagaaacagtaaccagaagcatgataagagacaagaaatctttttagtcacacaaataatcgacaaaagagataataaagagttaaaataatagcaaaatagtttttcactggccaaaaaacagtgaggcccattatttatcaaatatgtcaccgtaactgatatgcaaatatgtgccaaaatagagaaagaccatctaaggtcagggactcagagaggacagccctaatgtagagaatagttccaagttaaagcagttcaacaggaaggtgcacagaaagctctggcttttgtctgatatcccaggagaatagcagagtgttgatgagcaggttctgcctccaaaaagctcttccttcccatggtatcacttcagagcctttggactagctcttgcgagagaagggtccaagacagtactcgtaccagtatccactttatagtgacattaattcaaataaactgtcccagcgttatctatccttttaaaaccttttagaaataagcttttttctcccctatgctctctttagaagctgaaacccatcaaagcccatgaagagcaagtgtaaatttagagcaaccacatttatcaatagtttataataatctcagaggagaagcagagagaagaagaaagtaagagggaatgagagaaatagtgaaatttttttcaggaaaattacattacccattatttagatcaagtcactcaaaaacaataaaggatacccaattccatagtggtatcatgtaagagcagatgtgggaggatttttttttcccccagctccacccttccttacaggacaaatcgcttaacctatctgtgtaatagtgtatttgtcaaataaatagaaaaccatctatcctcatctacttcacagcagtattgctaaggctgattgtgcacacatatattaatgtatatatcgtagctatctatttacagcaggggagaatggttttaaaataaatgaatcagagttttatgtgtgcatccattgtgaaggtcagtcactttttaaaaaaaaaaaagtaagaccttctctgctgattaccatttgttaaaacacttgaaaatgatggctgagcctacatcacctctgtgaaatggaagacttttgaaatctaagcatgattatagagattcaaacacatttccatctacttatggaccctaatggccttacgcagagcagcagtacaaacctattaagccaaataaaagattagctttgccaatagatatcttttaaaaaatcctaaatcaaggatatagcaattggtctagtgtcaaagtataattctggctgtaggagtgaactggttctctatattagatatttttctttaatgggacaaagatgtatagaaaggacggaattaagtttcaacctgtacagacatcctaggcatctgccaagctactggtctatccactcaagaagtaggctaagtatatataaagtccctaaggtcattggaaaagaggccacattcatttcactttggactgctgttattcttttgatgttggtctgagctctttaaatctctactttcttcatacatacatacattttttagacatgatgttaccctccaatagcttttcaccaggcccattccaagcatccaggaaagagaaacttagcttccatggagagtgaagtcatcgcttcaacttagcataataagaaagggagaaagcatactgttggtgaaatgagggagtttctgctaggctatgaccagattcttctgtttctgctattttttctctaactgaaaagagttattgtggtaattcacctgcacttctgaacctgtgtgcatacacccaagacctactcaaggtaaagccagaaagagattaagagcagactttcatccaggggactcagcttctttttagtgacttctgcttgttttgttgttgtttttaaataaatttgtgtttttagaaaatatgtttgaattcccagacattgatatcctgggcatccttaggttgtgacagaaacacggattagtgactgtgacaaatgtcgcagaagccagtgcagttgcaatctatcaaatatgttggcagaccccaggattttctgatccttgttgcagaattcagttgtgtccttaccgtaggaagacagggttaactgagagttttgagagttgtggtatgtgcttttccatttgggtctgggtagctctgggactggaataccttggtaaaaacaataactaaaactagggccagcttcatgggtatacaacctgtgcagttgcacaaggtcccatgtttggacgggccctatgcctggcttgatgtgcttctgttgctgtcctgaaattcttaataattttttaataaggagccctactttttttatttttccttgagccccacaaattatagagctggtcttgcctagaatttatctttccctagcataccaattgaaagtatcagtcattttttctcttactgaaaatgatacctttttcaattcctcaaaagttaattcctccattaaactctttgaagatttctgtccacataatgtggttcagaagaactcatctctccttctttcctccaagcaccttgagatgattatgatcaaggtgatcttgttttgtaatcagaaactctatagctgtctcagccaagttttgttttgtttttttttgtttttttttgtttttttttggcaaggagtgaatactagggagaaatagttgtatcatagtagtgagggctttggcctttattggatcattaaaataggcttcagtcattaaattgatgttttaaaatgagcacctaacattaagattatcttagcctaggtacctcccaaccatcatgtgatcaaacacatccgtgtatgctaaaaacaagctgatctctcagctctggccctgggcttctgcctctctcagacccccaccaatgccactgctagctatgtgttctgtggccttcccctcatcttcccttctgctttcagctcagatcaatccttttattcttcttactcaaaacacaactggcattagcaggaggcagttcctcgcttcagtctacatgtagcatctaaggagactacttcttgctgagttttgtacaaacacactaatgcctgccaccacattgatgagtgtgaattacagaattgtaaggcctggagcagaccccagagatggatgggcctgtccacactgacagtttgttaggaccaagccttaatccagaaaatgtaggcctcctgactcctagtcaggtatgctttggataactcaaggggtgttcgacattcctgaaagataaattccacatgactggctcctaaacctgttttcaagcacccatgagtgaaaggaggaggagaagaaaaagaaatatatacatataaataaatattttgtaggagctgagaaaagagtgctgtgtaacaaggagcctgactggccaccttgagctctagttagctgcttcaaccctataaaatacttcctattactaataatatcttcagggctgttggaaggatctagagagatgcttacctaacacaaagcctaactcacttggaagctgaggaaaggttaatttcttctacctcttcctcctccttctttgcccttactttcacacattttttcctccctgctctaggaaaggaaggaaaacagaagggatctgatggagagatagtctttgtgagtttaaattatatgagattaagctactctcacctcaaccaagtaggctgtagtttgctgaccccctgttgagcaacagcacaaccatggagcaacagaagagccaaaggcatttttgataaaccatgacatctctcaagggatttttttagtggttcaccagctccagacaaggccctgggcaaaaactgcaatagagactgggttcttttcagtccttgtcacccacttcatcttctcctctgccagcagagcctagggtccttgtgttagttaatctgattgcttccttcaccttcccctgttccagaattatccctatccctccctccagctccagttcaaaactgctttacactgagataactctcttggagttgaagtggttatagcatgaaggcatgaatggcttgacccctccgtggtatgtttgcatctcagaagaagtgctggaaaaccttttttagcaaggggacttttcttcttgcaggctcacaatcagctatgttcccaatgtgactatacccaccccacccctttcttttttgttttttaagggttgaagtctggctcaatcacccaggctggagtatagtgccacaatcatggctcactgcagcctcaaacttctgtctttgctgtaatcacacatgtgatgtgaactcagaaaagcaaactttgttcctggaggaaagagagggagggaatataggtttacatagtgaataaaacccagtatgatagcaaagggtctctcttacgaaaatataacacaatattactttttttgtatgaaaataagtttctatcttggatagccaaggccttaacaggtaacattataagagtactataaacaaatttaaaacccaaatgttttgtgataagtcagggcttctacctcctgtgaactctgggcattttgcaaatttgaataatcagtcatctcgagtctcctctttttacagatgagagtattgaggctcagatgggacacaggttttcttctgggtcaccaaactcaacagcagagctgagtttggggcccttgggcctctagggagatctagcttttctgtctgatacgggaactcctaagagcacctccatccaccccagccagctttcctttcttctggtcatttctctttaacagttgttgctcctgcactcatcaaaaaaaaatgtcagcacaagaatcaaagggaggctatggagcattagagaaatattagcaactattgaaaagacattttgacctatttctgtagttatcaatttaatagtatttgttgccaggaaatgcaccgttggcgggtgggaaggtggattgcaccagcagcctgttctcagaggccctccagttacaggaggtggtaattccagttaataaaagggtgaacttcaaacacattttaaccaaatcaaattgtagcgggaaatatcatattactgatgttcaagctgactcacagctggtaacattagtcagtatataggccccaaattctgacttttcagcattttcagatgagtttctggcagtgagagagttccccaggcacattgttatgtaggaataggagatttttagctaacataggagctagcataaatgaagaatttttttattctcgttagactttttataagattgtcagatattcaaataatatgtaaccaagccaaacttcaggttgataggaaatctagagccaggagttttaatttttttgttgttttgtttttttctgtgacatgttggcaaatgataaaagcaattcactctgctaaccagagatgctgggcagaattcccccaacactgatttcatgccatgaaaagcacatgaagtctggcctggcaaggcatggtgaggagcacaggctttgtgtcctactgctccaatttgaattccagcttagtccctactagctgtgtgaccaaaggatatttacgtaacttctctgaaccttaggattcttatacaaaaaaaatgggcaaaatatcaatcattcgtagttggtatgaagatcaaatgagataacatatgtaaagaaatccatgcataaagaaaaacagtgccaaacgtgtaccaggtgttcagaagtgatcactgttatcttcctcccttttgctgctatggtgtgcaagtttttttttttaaagagttaattattttccaataaaatgcacagcttttcatatgataataaaaggaaatgctgctggatactccacagattaatctggtgagtcttgtttgagtgaatggctgtttgccacctcattttagtcccagttaagcttagacttccctttattaacctctctccggatcatacatacaataggatacatggactacatgataaatcaaatggccccctgataacacagtcccaagttgtgtgagcattggtgagacaatggatcatatgaatagctagaaccgctcatctctcttccacatgtgtcctactacacctcactttgaatcaggaaagatgccagacacctttctatgggattgcctcccacctggattttttcctaaactttttccatgcgcctgaatctcggttttcacagagattaattctgatttggttcgcctacacttttgatgctctaaacctttttattgttggcagatagtctcaaatactgtgtttgagaatggaaaaagaaaacgctgctcaaatgtaagcaccattgaatcaaagaaaccgtattttttcaattgcattatttgaggatccagacaaccttgaatcctttacaaaagcacatcagtaaggctatcctctctcttagaaagatacacacacacacacacacacacacacacacaaacacacacacacacaccccaattgcagaaggctactcttcatgaggtaaaggactagagtgtccaagaggaatacaaaatgaaaaagatgtttctgtaggaagaacccagacctagaagccaggacattcaaattctatttcccactaccatgggaaatacgatcttatatggatcctagcatacctgcctctcccgaactccatcgtcacatctagagaacatggattccaactcatactccttaggggctatcaggaaatgtattttttgctgttttgaaagacattttgatacccctaccgagagcattttgcacaggccaagtatttccctcatttggaagactgaagccctgaattttacttcccatcactctggaatgggtaaaaaactgaactttttacactagtgtgggaagaaaatgatgttcttataatgccaacttctagcagggtgttaataatcatctaaaatatctagaactaacacagacccattgacctggtctgtcattcaattgacttccacttttatccatgcatgtttttgataaacattaattatggggtgacccagtgtgagaggagctgtggacacagtgagcacatccctcccctcacagcctagctaaccctccaatcccctaatgcacatcaattgtaagttgacttaaagttgtacagatccttcctttctgtgcattgagtcatttcagtatgtctatggaggggtggttctatagccaggaggacttgcttcttccgaactgctaaagcacttatttgtatgtctcctgtggcactgattacatactgtcttatactagagcatgtttatatgtctcattcctcctgccactgcacagtaagcttaataaatacagagactgtacttacacacagttgtatccccctcaacacctagaatgtgccatcagaaataaaaggtatagtagtaaatgttgtgatttgaatgagtgaaattaacaatggcatgtgagtgtttggaaagaaattaccttttctgaatccataaatttctactcagaagcagagaacatcactcagttacatcagaaaagcttaaggatgttttttctttccagtttattacttataggtttcattcttccccactcttgacatttgcacatagtaggtttttaataaattattattgatgtatttattaaaagtatagaataaagtagaggtgtcccactcctgtcttctaaaatagtaattttgattttcatctacttctttatcttcagaccttgtctattcctacagcacagatatcctgggatttcattccaagtggttcctgacttgagcttagacgtggtcatgacttttaacttggcctctttatcaggcttcttacagggcagaaggaaaatcttttttttctgtttcctcgtctccctcataggactgttgtatagttgaaaaggacctatatctacgtaaaactattttaattcctagagtaacataataacagattcataatgtcagattgaagaagctttggcatcccagcacaccaaatggttttgtacaccctgtttcaagcttatccatggacctgaggggtgaggagtttattactctaagcttttaggttaggttcgtatgatctgtaccagctacattaaccttgacctcagtccaaatgaggtagctgatttaatgtgtcctctccagtcacacaaaagcttcaccattactctccgacctgattagatgctaaatttcatccacacaaaatgatctggaaccagtcgtcttggtgttaggtcacaggaagtgataccaaagaattccaaaataaatacattattccagttttcctttggttcttcctcaaaaagtctgtctcacagcagactcagagagccagtccctcctcagctagacattctgttgagtcatgtttactgtccccctcagaaaggttccaaaagcaaatgcaagaggttgccgaatgcagggacatgtggcgtgcatgctactgaagtgagaggcatagcacacacctgctttttggctgtggcaggccatcttgactgtgccatgccacaagttagcattttggatgagcaattgccattctgttgttttcttctcaacacatggtgttcaaaaacagttaaaagaaaactgtacccatttgctcatcccagaaatctaaaatttcaaagaagcatgccaaattaattttcacataatattttccaagctttttctttgcactgagaaatggtatttcactttttgaactcttggtgtcctggcctgaggtaaatgggtacagtttctctttaaatggcattaaacatatcaaagcaggattatatctgtcactgtcttttttttttttttctaatggaatcaaaatccttcagggagtgtcccaaatccacattaatgtctttgagtgctaatgtttccactgggacttttacattagcaaaatataagtgtgtggttttcccccctctctctgctgtctgtataagaaagagacaactgcacatccgttattctccatggccttcagctaacccatgttaaggtggtaaaagatgactagagatttttggtgctaatgtttccttttctaccttttcactcctttgtgccacttgaccgaaaagctactgtgaatgctgtttccaacatggacaaatctttggaatcccagccatgaatctttgaaatcccagcatttggtctgttaaacagaccaaactgcagtagctgtcaatgctgtttttacctttggttctgattgtggaaaaattagacaaatacccagaactttaggatctcactatagatatttttgtcattaatattggggtatgagtcatgtgtcctttttattgttggtggacgcacttcctgtctaccttaatccctcttttcttgttctttagcaaagcagttcaaatggtattttgtcaactcttgattatcaagtgtcaatgaaagactacaatgtcataaatagaaaataattgtaaataataaataactttaacataatgaatcattagctgtcatagtacatttaatcttagaatgcacctttttcttgcatttgaacatgctctggaaaattacattatttcttgaataatcgtttttatacgtaatgtagaaggggctagaaagctctgcaatatccgtctctgacccccttccagagtttttcttcttttagcaccatcctgcctactgagggttttagttctggagctgatagagactcttcatccatggagagctgggaggtgccttgctcttgaggctcacccttttcatcgtttcactttctggagcactctggaagactacactacttccttagaccctcttcctatccttcctccttcttcttctgtactttttcctgctttttctgtttttcgttttcttttcctatcccgcgtgaaactagaacgtgaactggggtgtatgtttgtgtggatggaggggcacagggaggaggggactctccaaatgccccagcttagcacgaggagaaactccatgttttcatttaaacaacctttccccacatctaggccttcatatatgagagaaaaattcacttgttttcctttccacactttacagaaaacaaggtaagtagaggcagtgagaatgccaaccctggagtaaaaatgaagcagactatgtgctcacctttaaatatttttaaggataaaaccctatctactggcagttaacagggaattcactgtgccaggtttttgtaggagcagtgcatgatgttccctggcactgaaagagtttatagggtattttttatgtttttagcattaatttttgcatgataactttgcaacatcaggtaaattgtcttctaaaattaaaaaaatacatgagtgatttgaattttctacatcaatattctatggtggatccaaatgttagtttgctcatgctcatatatttaaacatcaaggtggcagaaaatgtgtgtttatattcgaattaattgggcacataacttagcatcatatagtagatatccaataaaaagactgccagtggcattcattgttgtttcatttttgggtttctcccttagcaggcttataggctttgtagatggacaaacttggatccaaatatgagtgccataaattactttctagctttgtatgtctgctcaaaacacaatcttgctgtgcctcagtttctttaccagaagaaatggaaacaatctctgctctgggagatgtttatgagaattaaatgagctaatttgtgtaaagaacctagcatagtactgaaatgtagtaggcactcacatgttatctttctcctttcttctttttaagagaaatgcttgggtaatatgatcacttctttactactagtgatttttctccataaccagattacttaaactaattgtattcattaggttttagctactcaatttttgttcatctcaaaggaaatcattgtgctttgccatatactaaaatataactgtaagggaaatgacttggagattaagtacagtcatcccttgatatccaatcagcagggcactggttccaggacaccccatcccaccccagcccaccacacagataccgaaatcaacaaatgctcaagtccctaatataaaatgggatagtatttgcatataacccatgcacatccttccgtgtactttaaatcatctctaaattacttataatacctaatgcaatgtaaggtctatgtaaatagctgttatactgcactgtttctttgtttgtgttatttttcattgtggtatcattattttttattggagggtttttttttccaaatattttccatttgcggatatagaacccatggatacggagggccagaggtctgactacaaatgtgttagatctgaaagaagcatgacttagcaacgttctctgccttattcttagtttcatccccatcctcaacctcaataccctctcagagactgggcagaaggagagcagcaatgcctagagagctctgtttctgagctaccgagttagggcattgaatttaggatggattctaaagggaaaaaaacatccaaatgcaccgaatagctgaaatccaatctttagatgtggggtaccagaaacattccagattatttccagtgtctaactaaaatataatgcagagtttatgccttctctcaagattcaaaattaatgattatgatttgtattaatccaataggaattagtttgactacttgattatttaagaggttgtattgtagatataaaacaactatactgttaactctttttgaaacagcacaaactatgtctaatcgtacttttttacttttataatacttgcacacagagttcagtaactgtttgttcactgaacaaatgaatctagtccgtggcttcttgaccatggtagtgaaaatgctacaacaccggtcctctttttactacccagcaatatattttatacagacttatctatatctatagatctctccccctgtatctttttttgtatatatatgtataattgtttaaataaaaggccttgaaggacccaattccactggattcctcatagccccaaatctatctgtaaattcattactgctagaattgccaactacagaattaacttctgtgaccattggcaagtcctcagtttcctcatttacaaaatgactaaaagatcactaaggtaaaaaacacttcccactccagaatttgattctttctctctagtgagaagtcatatctttttgagaggtatcctattgtttgaacttagcacaagttttttccttgatgcaagaatcacaaatgaaattatttgtattctactaggggctggggacttgtacttgcttttaaaactgtttcaggacaaccattgagataggtgtcttttcatttctttacttacttagatactgggactcaacatggtgggggcagccagacctccacaggagcctgccaggtttctgtcattccccccacctaccaaaaaaagaaaaagactaaaatctacccagttccccacttctgggccccttcagggcacttcctctttggtgcaaatgaggcctgtccctcccagtctagctccatagatgcttttctggtgtgcttggtattaatgacatagtctgctttcgtcagccttaccatttccggagtgaggtatttcttggtagtttgcatttttttcttttaatacctgcgtatttaatgttgtgtctgatagagtctgattgtccccattgtgaacgtggtttttaagtcattaatatgttgatttggttcgtaaaagtgagagtaaactgccactatggtacagtactttgttggggggtatgggggattctctctattttctcttctttttacaagaagaaaaaggccccaaattgtgccctttggattatcttgttctctttttacatttgaatttcaaaatcccctttaaatgaacaaatctcaaggtttctattacgacagatgcctttgggcatgccccccagtccccgtgactttatggctgtgggcacttcttcctttcagctctttgtgaatattctgtgtccctggccctctctcagagtcacattgacattcaaacaataacctctcccttagttggtgctccttgattgccaaaacgagtgctctgcctctactgctttacctctgttaacaatcattctccacgtttctgaagaaaaagaaagtcttaacatttaatttcttattacacgatacattttgattaacacccaagtattagatgttggtgagtgctgaggggaagacccagacagcagacaccaaatcttatttttggagactatttacagtataaatgtgtagtacttgggggtgggcaagtcttgcacatttgaataaaagaggaacagagttgttgtctcatctgtgtcaggaccttctcctcttcggtctgcattgcagtcctgctttggcttaattaatccattaagctctatcttaaccctagtcagtaatgatcgaggggctcactggagccatctagaatgggagaaattagatggataatgatttttgtgctgatgatgtgttctgtctttttatatagttgatcccgtgagggacatatttctttggtgtattcctgctgatgttctcaagacagatatattacagagaaataaatcagactatgagactttgctagtgtctacttcttggtgtgtaaatttaacgttttaaaatcaaagctgtttttaaaaatatagttttatgaatataatattaaacaatcaagagggtgagagaaatttgggaaactctcattttggtattatttcttgttacactcagatgctgctatggaatatttatgttcatagtcttctgattccttcctcctctgtgagtaaactgtttaagatggttcctcctcaattcaattcaacaagtgtgtgtttagtgatacctatcatgtgcatagcggttgacagatctcaaaaagcatgagacttaaatggctttatatatattaaagtaacaaaatgggacttttttcatttttgttttttataccaatttgaaatcaagacttaaaagttgcaaggcaataaataaactgtattaaataccatattttgctgccatcaaaataatttataaacaactacaatacacaattaaaaatataatttttttctgaaatgtgtggaaaggtgggtggagtggttcttaccttgttttagagggttaacagttggctggtaatcatcttggaaatctctctggcataagtgaggtttaagttatcatctgaatgaaggaaagatgttcttcagtgcatgagggattattccgtagatgcaggcttatgtggaaaaagttcagagatggagagggtgtattctcagcggaaggaagccagaagacaaaagcgacttgctgtgtggattaaggtgggccttagtggcaccggatgctgacaggttagacaagcagacctacagggagggggctttcagtgctgggagtctataattcacaattgatctgaagtagggtagaaagccactggaggactaaagagggaactgtgacagtcaaaccattgagaatatgtttggagtgaggaggcaatttttttttttttttttttgagatggagtcttgctctgtcacccaggcaggagtgcagtggcgcgatctcggctcactacaagctccgcctccaggttcacgccattctcctgcctcagcctcccaagtagctgggactacaggcgcccgccaccacgcccagctaattttgtttttgtatttttaatagagatggggtttcaccgtgttagccaggatggtctcaatctcctgacctcatgatccgcccacctcggcctcccaaagtgctgggattacaggcgtgagccaccgcacccggctgaggaggcaattttcatatcctaggtacaatgtgattaggagctggccaagaatattagtttaaaaaggtatatttgagttaacatcatcataagaaaatttctaaatttgataagtggctctatatgagaagcaatatattaaaatgtgaacgtttagcagaagattgaggcattggatatattagactgtggttatacagaatttgtatagcagaatgatttaaaaggaaagagagaatgctttttattatttgggttttgaggggctagcagccatctaagtagagatattctgaagagaaagtgttatctaagttaactaacttagttaaccctaactaaaagaggtagattatgagaaaagatggatgagtgcatcagcccttcagatgcatgagtataagaagaaaaaactatggccttaagatagttctttgagggacagcatatttaagagttacaaaaggtaatattgaggaaataaatgaagggagaagattgagccaagattataaattatagaagccaaagacatagaaagaaatcattttgagcgttttagggtaaaaaagcaaaaaagggctagaaggaaccctgcaggatcgtctcagtcagtattcaaattttgtgtattgggaaaaggagacctagaagacagatgtggtcgaagtaagcagagacaacgtgtagaagaaataggacttcaagtgccccttcacctctgctatgctgcctcagtgggggacttgtccagtcatctcttgcaaatgtcatgatttaagcaaagaacagctaaatttgtagagggccaggctgacacaaactggcttttgtaaatccattgccaagagtaagggagaaggcgatattaaaatctctatcactgcttcagctgtaaacagggtggtcagctgaagaattaatggtttttcaaatttcagagcgacaccttgttgcctactaagtatcagaatcacgtgcataagagggcattcagatacacagctacacaattatgtaatggttttcaacttggtccttaatatggagggaaaattctagggatgtctgccaaattaaaataattaaaattgaacctagacttaattgatttaaaaaaagaaagaaagaaagaaactgaagaatccttcactctgtcctaaactgagaggccggtttgctttacaccttgaccagctttcttcagaatgacagtaaaaggacttggtcaatgccatggtacaaaagatgtgccatgccttgcttactagatatttttaaattgcttcttttctttaggaagacctcctaagtttcacctaagtaaagaccgtaaacttgagcccatgcaaactacaactgtaagatcgtgcaggggatggaggttctgtgcaattgtgacatgttaaacggggctcccctgcataatgtgatccctgtctttaggaatagcgctttgctcccatgttaatacattctggaaattgctcaagaggcagctttggcattagaatagcaactttcaaagcagtgaacgtcagcacttctatttctccttctttttggcgtgcattacatgaagctggaaggactaattggctaaatgaagggactcagtgtcgcagagttgaaatcctggcatgtaaatggagaggtggggagagactttgcatgcatatctatatggcctccctttgtgaattatcataatagaaatggttctgccccttctctagtttccctgcgagatgagttggggtgtgaagtgcatggcacagaaattcaccatgctttgtatctatgattacttgtgtctgtgtgcatcttttccactcctaaattgcatgtttacccaaagttgctgaataatacattgtttcaaaagatgtgtccctgaattaaggttgttatgtgacaattataatatgaccgtgtacagctgctaacaactgtaaagaaaaataaaatcagtaagtggcattttcaaaagcaaacaaggaaatcgcttatttgttttataggtgttagatttacttccttgacctctgccaagcattgataaagactggtcaataatgggatcaaacagttcacatgaggttggttccctatgaccgtagtcaacttagcatgtgggatggctcagtcattgaatcatacacatacattttatgaaagagtatttcaagataagctctacagatcatttttaacttttatgagaagccaaagcctagaactcttctggttcacctgtcctgccctctagtagcatgttaactaaattgtcacagataaatagggatcaaatgtatttcataaaacttacactgggacatcagagtatttcatatgaggatttaacatctcctgaagtatgtaataattttataactcaactcaatccctcatacttcataaaccccctttttaaatgtttaatctgagttataggtaaggaacatctattaacacatcatcttactaatgaccattatcaaattatctctttaatattttgggcaaacaaggaaggaaggttctttggcctttgctctgaacccttgctaagctttccccatttccattaagtatggaactttgaattccaaggtataaaacacagggtgaatgtaagtcatccacttctttgttaacttttgttaacttctttgttaacttttataagcattttatttgtaaagcacattttatgcttagttaagtctatgagagctgagcctgacacaccagagtgatgttctgtagtataaactccttacagactaataattgttgatcagtgagaaagtcatttgagctcactaggtaccattgtacaaaattttgtggttaaagagtgttccatggaagcttgacagtgaaagagggagttagtggctcaactgaaagctcagtgaagtttagacattggttaaatcaaatttgagaatgccatatttgatttaaagattaaatattaaaatgttgccctttgattatgggagaaaagggcttgcctggggaagaacatgggtagagctaggcccttactgccaaatgatggaaaataccctttccatgttgccttctacccaggaggggtgaagtagactttgactactttgccaatcattggtcatgctgctgtaaaggtaaaggtgactgacccaaaatatatataacaccatttttttcagtagcttatgatataatttcatctcatccatcaataaataagaacacacaggtgtcattctccccaaatgagaaatggaaaaattgaggctctgtaaggttcagtaccttgcttagtgttacctaaataatcagcggttacatcaaaaccagaactaagtttgatgtctagaagctacagaatataattttcaggaccaagtggaacaagttatgttcagtttgattttaatgcatttcagaatctggacaacatcttacaaaatgtctgattatatcctattttttctgtagatttctagaaagggaattacaattgggggtgcagggtaaatctattttctgacagtggtatgcctttgctcttacaatcttatcagctgaattgagggaaaattcatattccatgtcaaattcatgtaaggcgggtaatgtccggttgcagtatattcacaaaatatactttcttgctgtgtgttcataaagtcctacttcacagccacaaggtttgtagatctttgacacaagagaagtggcagcaacaactccaaaggggactgtgtcctttgttgtctaagagtggcttctaggtgagctttgaatcccattgtgagaattccaggagtgtggaacaaaataggaaagctatagactgagcagacgatgtagtggtctaagtaaaatgtagttagtctttcatttctcttcattttaccctctatcatgccgtagtgagacagaagagctgatttaaatagtgaaagaattcttctaaacttcatctacttgtgtgttcaacagggctggagggaggctataaaagaaagtcatggaacagagctatacttgtgcttggttcatgccttgtagcagattagtctttggggccattccatgggagattgcactaagatacagcccgaaacaaagtgatgttgagtgagagggagagacagggtggtgtcaaccagatgagggacactggaggagagggaatattttccctgaaaggctcaccacccacgcagagttaaaaaaaaaaaaaaaatctgtagtcttaaaatgactttaatgtcttattttttccttcaccaggaaattaacattcagaaagttatgtttttgaatgtgtcctgatgtatgtctaaatcaggagtacatttttatggctaggttataaacccatcataatagtgaggggttaaaatggaatgccttcaaaagataacctatacctactgcaggcttgaaactcgattagcccagctattaaaaccaggaggacaaactgtttcttccctggattcaaaagctgttaggctacggcatgacccagtacaaaagttttctgaatctctctccactttacaaaacgtcggctcattgctgccgtctgcagtgaagctgtttacagctctgtgctaagtggaaagttcaaatcaattattgtccattagagtttaggtataactgatgaaatatccccagaggagtattgtaaatgtatcaagacgtccttccccattatagaaatggggacgcatagtgaattacttaccttctctcttacccttaatgcctctgaaaggctgctgggcagacagagctcatcttgtcttgctgggctttaaagtgagaactttaccatttggtgaacatgcatagtgagctggcaaaaagtaaatttcaactctctagactatcctgtggacataaaggtctaagaaacaaaagataggaaaagccctaagaattgattaaagccaaaacccacaagttccctggtaatcaagatattttagaaatataagcttcttattaacaatcaaatgagaaaagctttgactccaagtctttagcaaatgatggtatggtttaatgccaaataatttgtgctagggcgctttctttcataaaactggttctctagatttgtctgtatctggcttcagcaggacagaaaaggagacccactgacttctcaagtgcaagagagatagttctaattttccagaatctgttattcagttatagagtctaatagtgacttccacctcataaaggccagaactgagaggaagaagagggtcttatttgtaatcttctataacatgagatggaatagaaggcattttacttccttttagagttgtctttacttattccctttccctagttgtgccccagagcaatccctgtgccctagagaccctaaggctgaaatgcacagggacttgtcttgacatgggaaagactggatagtattcttcagagtgctatgatttttcaaaaaccagagaagtgtcagacaaaagtcaaggagacatcattctcctgtatcaacctttccttcctgtatgtgcacaggcgggcaagacacctttttattcgttcagctccaatgggtgccctacagggaagcactggaacataattccaacccagactgccagtcgcaatggggataagaagcatctttaaaatgcaacactgatttctttgtgtttctttaacaccaaggataactccaaggatgtttctttctgctgacagctctgtccgtggtgctaagtaggaaattggctgtatttcctccttttggcccatactgcttacccccagctctcctgggcttccccatatctatctatagagatgctaattgctatacagtaaatctagttgagatgaaaacaatgcttccaggatatttatcaagttagattttcttctagatcactcaggtaatgagagttttcatgttgctttgtagctctatctagataagtctgttgctctttttaagtttacaaggagaagtccattgggacctacctttcattactaaaccaatacttttttaccaaattatgtactgtaaaaactgtcactaactcagagagcgatctgggccatgcccacccagttcccctcccctcaagtgtacatctactcacatatcaccagcttcgaacaatttatgatatttaaagatttagccaatttatttcccacattcataataagggccattgccctggtgcactcagcatgcacacggtatgtttctcttctttcggatttcatttattctctttggtatgtcagttgttttggcaacgtagattgtataattgtttcctcttggtgttttaggagaattattttatatgctaagtgtgagactaaaacttagtgattaaagtctaaatcctgtaaaataattaaaattatacaaagaggatggccttcagatttgtcctgtgtcttaatgacaaaatgccaaagaactgtacaggtccctatctttcttcattgggagtacagcatctgggtgctacacttgaaaagcagcctcaatgtgacagcattaaatatatacccacagtaccaaatgtgtgtttagagttattttcctgccctattactatgtgtttagtcagtcctttctcaaatcagcttccctgttctgaaacccattttgcttgccctcttctgactaccagccagcacacccatagactgctaatacgcttgctcagagttaaggagcagtcctggttttcaagtttcttgtagccattatttgtgttccaaattatgttactgtgtctgtattaattttatgtttctgaaagtgaactccgtgtatttcaaggcagcacggtttcttttttgtattttccagggaactggtgtttttaatgtcatgtgaggacaacattacacaatggatctttggcagggatacacagaaatgaataccgtgtgcgaacaaacattaaatggcagtcttaattacagagtttgattctgttgtttttaatgcccttcaattttataatttgatggaaaatgcatcaacacagctattttctttctaccctaaatgattaaagattgatatacccccaaaccagtagcttgttagatctggttaatcaggtaggtcttacatttcatccactagagggcagtagggatacacatccacagcaaccaatatgtgcaacatatggtcgatgtggaaacatagtagccatagctttcctgtgtatgaaaaattcccattacagtgttgcttcacttataattatattgaaagtaaacactaattcacagacggactacgcatattttatttcaacataccccactagtgttttgtctattctactttaaaatgccctgagtaatgaaacttctactacttcccttgggaaactgtatcaaaacccaactgttctcactgcttgatttttttttttttaatatactcaagatctattagtctttcttctagttcatttataactctattgaaatctattccattttttcttatgataaggctagtttcattctggaaagcaaatgtttattgagagcctattgtgtgtaagatatcactaagtgaatgtatggccacaactgacaagggttgcaatacagaatttgaataaatttgcatgactcagaaagctaaagaagaaactctcccaggtcaaatgtcagaagaaaagttggtctcagttctaaaatgagtaatagccataaggctgtcacagcttggggaaatgtttagttgtacttagatttctgtattgaaattcaaagggcatcaggaatgcttggtaacatcagataacacctaaagaattgtgaggtatgcagctaacacatcagtgggttcatgccaagcaaatgacctggaagtttactaatcaaggttgatccttcttcctttcacagctgatggccagattagcctagaagtttcagaatctatactgagaatcattatatgcatttatgaaggataggaaatgggttagtgaatttacccaaggtgggcgtaccttgattatgttgcattgtctattttctatcatcgactttttgggtccaatcttggtcactacacacactacacaatgggaaagcgatccaagttcatgtgcaatactctggtttgcatcattagtttcttggcatatactttgattattaagtatctgaaggggagggtagaagaaatccaagccaagaaagttcctttaaggctagaactcacaattacacacttgtttaaaagtccttttttcctttacattaaagacagagcaagattttttgctctattgagtatattcatctggaaggatttccataaggctgtcctgatcactaagagcaattcccagatagacgtgtatgcaaacaagaactgttcagactccaagagcaaaaattgaacactgcagaaattccagaaatgatactaccttttatattaacgtcctttgagcctctgtaggaagtaaactattctccagagtttttgaaataaagcactttcttttgccaattaagagcgcaagaatgtggtttcatagactgtggtttcattttcttaaggaaaatagtagggacggttacagaatcttcgtggaagtctacacaataccataacccaggtttctatcacaaacaaagcttagatttgaaatttatgtcacctgtaataaagtccacatgagtgttttctgtggaagtaattaagtgcaaatgtgcaacagccatttttgtgtttttgtttgtttcaaaataccagaggtgattaggccatattatgaactaattacttacttaatttatttaagttgaaacgagtttttgagttatacgagggccagaaacaagaactcgttaatccattctgcacatcactgaaaagaacaaaacaaagaagttaacgcctttattttattatgttacaacacactaatattttgaacactgatgaggacccaagtggtcaaaacatctgtatttggtaagaaaataaaacaaactctttttttccaccaccatttggttctttcagtggtgtgctgaaattcagaatgaatcaccaaaggtattaaaatggtgtgtcctttttagtacattttcctatggcatttaaaagattcttcaaacatatttgaaaatagtaaataaatgacctacaaaactcaatattttcttaaatttggaagtaaaccacattcattcctgggcttgggactctatacaccaagtttcaaaccggagcatattttggtattttgatagttgagttataaccccctgaaaagagggactgattatgtgcagtaaggacagctgcccatggagctgcaactgagctgctaaaataaagctagtgtttacctgtcgctgctgaccaagagatgtgagactcagtagatctgttctgtagaccctaagagaagctctgtcagcactctgcgattgagtttcaccgtctgcgtctatacttagccagcttctagaaggggagaaagtgggggatacaatacactcatggaagcaaaaccaaaacaaaacaaaaccctgtatgttgcaagcaaattgaaaatgtcagagaatatttatgatccaaggttacttgttctaatgtttgattctttatcttccaggttctaatccctctatttagttagttgtttttttttttttttaagtattgctaaggaattgaaattatcatatgtctgaccacaatgatcaggtggttgatattattaagtgtctcaatttttattttcacaagttcttttatgacttgattctcattatctaaagcaaaattctggcatgtgattgccacctaaatccctgggtgtaccatacgtgggcaaattctatgctcaactatagtatttacaaagaggtagtggctcaatctgtaatactggctaagtcatttcccacccctgtaggagatggggtgactgcaatggaagcagacttctgtttttccatgtgaaaagtgaagaggaaaaaaatatctgtaattttcatatcccaactgaatgttgtagggatttgatgagctatttatgcaatcttaaaatcagggaattctctcaggattggttatctcttttgggaagaggctactggcaagaacactttcaggtgattcaaagagtctgaatagtaagattgttcttgtagcacaactactatatggtgataccactgactcaatgtcagtgagacccacgttttaagttatttcgcccaggagttcagatgcattagtatcaagccccgtgctctctcttggccccactccatttaaccctaaattagaatccttgactatgaaatagagtttttctctattccaagacatttattcattgagcaaatatttattaagtactatgtgcaaagtattatatcaggccatctgatttatatgaaaactgaatctctaatgttaaccttattaaacctatgttctaaccgagtaagccagccaaacaagacacaaaatcagaactttagatttgaaaggagtcccacactttacaggtgaaggcatttaggcctagacagtgtagtgattttgtaccacccaacacatcaaatttgtatcaagagccagaagcagagttcaaagctgctggtcatcagtcgaagatgtcttccatccctatatgccccttcatcaagtttttctctgaatctagacagtcatttctgacatttttctcttactctctttcttctttggcactgatagttcctttagttcagttaacaatgacatagctttaccaggttcagcagtgccacatccctatgccttgtttgcagcgagattgtcacattggtgttgagggaatgtaaggaaattctgcttagaggattattttgaccttgtcctaatgatatcaaaccacattgatttttcattagtcagtgagagtcactatttggtcactatttgggtggtccctagccaagggaacatttgtgaaagctatgagttgccagtgttacagaaacccattacatctgtggttaaaatcctgggtgggtgcgggggggcggcagagaaaggggagcaaaaatatacaaaaggaaagggaagagaaccccagagaaaggagtatagatgactttacttttacctagacttttaataaaactcacaaatagctcctattcacatgtaaacatatataataattttatataaaatatatagtattttatatactatcatatagcattttatattttatatattttataattatattttatatattttatataaatatatagtattttatgtattcgttgtttcatataaaaataacttttcccatttcacaaggatagaaattaagatacaggtattttgtattatatttcaaggccacaaataattttgaaaggtttgttacttttgttatgagggacacagagctcctaagatatgttatcacagcctttaggctagcaacactcttgcattacacaatctcctattactaaacttaaattttcttcaaaatgtggagaaacaaagctcattcagattaaattagagtctgggaaagtaaactccggattcttctctaatgtttcttctcctcatcgtgcttctcccccaacccagctatttcttgtgtttctcatcttccattttgatatcccattcaacattagagtcaccaaagcaaggaggttgttggaattcatcatattcattcacttcttggatattacttctattgtagtacctgagtttagattaggaaaactaagaatgagtctttagattagttgatagagaagagtttctgttaatatacattatagtctgaggtactctataataatccatagcagcatgccttttacctcctcgtgatctgtttgcttcttttgttccctcttaatgagagctggagacatctttaatgtaaagccatagatgagcacatgatttgatgacaagaagctactgcacacacagtttagatatcaaggcaaatgaagagcaagacttcatatcgctttaacaggttaaattagtcatcttaagctgttaatacatcaggctactgggcagaaaacagcagcagtgtggtagcagagcttcagaagtagataatcctaaattcaaatcccaaatctgccatttaccagctgtgtgacctttgttaatttacttttcgtctctgaacttccctgatccttacttctctcatctgtaatatggagatgataatagttgctgcagagaaggagtggcataatacagcttaggtaatgtgacatatgtgactgcaggttcaagaatttgtgcaccttctggccccagcaggcttaatatcagcactatagttagtccctactttcttacaagcatgtgattataagaaaagcccctctggttcaggcttatggtcctttcagttcagcattcattttctgatcacagggacaggaaactgttatataagacacaattgtccttgttgctaacttaaagaattagagttattttcctccagatagcctagtttctctgaataacccactatggacttatccatgaatttagctaaacctttgtgatactatttatgtcatcgacctttaatgaattttataagttgattgcctactgtgtaaagtagttctttagtttgtcataaattgtttcttttgaaaagtagtaagatgacttccagttcacgtatactagaatttgaaaaagaaatccatagtcagtttcccagaccttttgtttctttatagacatttaccatatccttgcctggattttatcattataaatagaaatcttcatcttatgtcatgattattttaattaatactgaacgttctcctattctttttatttatttattttttgaagtacttcatccagaaagtatcccacccatgagttgccgttaccttttactagagctgatcgtaatttaactctccccttcctctatcaaaattacactctatgctctgggctcaaaacagaatgatcttagtgtgactgcaattgtatttaagccaaagttcagcttagaaacagctggcaaaatgttcaacaaactggaccatagaggaagaatcataacaaaaagatgtgattccgtttgtagcaaagggagaaacttgtcttaaggaaaagctagagactgaagtttttgctcattttggatatcctaaagaagaagtagaaggcgatgttttctgagccaatttgttccactaaaagtgaccagaatcaagtctaggttgggctggctgccctaggttgcagttagaggttggggctactgttttgacaatggcagcagaaatctgtgaccaaaaaaagcctaaaactgcttgcctctgtgctagcatcgctagcatgaagtaagatttgaactttaaatgactcattatgagtgggtggcaacctactgtggagttagtctatgaacccaaggtcagcatcccggtgagaaatcccttcaggtttgagtgagcgatacacccagtcacactgagatgggagatccttgtcctcttcagctttgtcagagcattccctgctttgtttccaatcctatttctgaggatatttggcacactgcttggctcacacttggcaccactgtcttcagaaaataaatgtcttacatttgtacagtgctttatagaacactttcacatagattgtctcagttgatcctcacaactctatggtaactgttcatgttcccattttatggatgaggaaaactgattgaattacttgtgcaaatggtgttagtaagttgtagagcagggactggccttatgatactaagtctatgtcctttccatgtcaccgccacaaagatagccaggtcatttctggacatcttcctgaaaatataccttgtttcattttcccctgaatgtactgcattatacttgcttgtactgaagttgccctgacctcttgtggatgacagcaagcctcatgagatcatcctgcagacttcgccttttaataccccgaatactaataacacaatgttctacaacttccatatcatgtggagatgttccgtaagcctagcaccaaccttgcatctggacattcagtctcagaagaggtcatttatcccaaacttttcttctttttgtaaactttccatattaaaatcgtccttccactccttaatttaaatgtgcttcaatattattttaacaaactcagtagcatctgtaccttacatctttctgtacccttccctcccttgtgagggaagaatccctgaatgatcctagtaagttctgaaaagccttagcagggtagataatgggtaaagatcattgtatttcagctccctgatccattacacccctgcctttcaccagcatgcagagcgttgtgtttttttctaacagaataaattaaatatgaaagagaaggactaatgtaattcaaataaacatgttaatgaccctatttttccatttggtaactagaccggatgtggtggaatgccagttttttactgagcctgtaatttaaaactttcaacaaggacactttttttcccttttatttccatcctccattcccacccgcttttattcttacagacactccttactgtccaattagttttggaacatgaaaactgtcctcactgatgcctggagccatgggggacctgggatggtttctctctgtggaatggcttgtaagaatccagttttactggtgatgaccctgccagagctctgtgctgttgaagggtgtggggaaggaggtgactggtgcatcctgcacctcctctgcacccccactttgtgtatttttgatattttgcatgtacatgtttgctgttctaggcagcacttcagcattcagatttgggaatagaagagctctcagtttgcttttaaccctgtaagtagccatccatcccagctacattttttatgagtcaaagccatgttttaagagcttgttatcatccaaactaaaaccctcactaactcgatgtgtccctggatgactccctagtttatttcttcccttccctccactaagtcagttgtctccctatgcaccccaggagtagccattttccacagcggccaccacctctcctccagaaaatgggcggctcaaaatggagcccttcctctcctccggacctcaaatctgccacctgtctgctccattcatcattagttagctatagagcctgatttttctccaaactgtatgtatttaatccctgatttcttcctcacccccacgatgtgacatcctttcagcattttacctgctggaaccagcgctctcttgtttcttttactgtggtcacttgctagagtttgaaggaaaactttttgatgtgaacacatttcagtttttttccaatttacactggagagaggaatgaaggggagagggggctctggccctgttacttcctgtttgtttttgttctggagaatgcagaccatctgtgtctctcagaagctattcttctacagccaccgtgctgaggctgatatttaatttcttagtttttccctcgtttctctctaatgtccttttcctcttccaaaaactcctaagcccctcattaaatctttcttcctgaattttcttatcttaatagtacctctggatacggttctgtccccattaaggccagaatttcaaattaagtaaatgataattggagagagaaaacaggagagaagggaacaaggaatcagtaagcaaacagaaaaaaaaaaagtgggttgactttttaaacatggagttcgctgattctcagagccacttcccatgtcctggcatccattgttcagctgatgtctcacctgttagatggaccttgtctttctcagaagaaacatctgctggatgttgggtctctctctgagttgcctgagaaggtccctccctaatttatttttcctgccacccagacttcgataaaggctatactttctcatgataatcaagatggttattttctagaactagtagagatattctccctcttctgagagctgcctgatgaatcccaacatatagtcaccctatataaaagtcctattttctttctgtttcttttacatgcaatttcactaaacaaagtctctaaacaactaggtcctctttcagtagataattctataacttatgaaatttcaagtgtttcataagaagcatctttctgaggcacatcttcatttcagatgtcattgcagtttaggacacaatatttccctcatttgtgttttttaaaaaacatagctttgatttttttttattcttaaggtcagaattaaaaagctaaatgaattccaggcttcaaactcccagaattatagctggttcaagcctaaaatgtgctatatcaactgtctacgggggaagtgccgagtagttgtggccttcgtggagtgttttttggagctctcgcctgtcccccacccccttccttcagctgcttctgtttgttcctgctgtagtgccttcagccatgaacataccgtttaatcagtggtgtattaaaatggacctgtacagtcagcaatagctaggccaaaatcgattggctatttttaaaaggaaaaaaggaagatagaaaattgctcttttaatctaggtaaatcaaatcgtgcctgcttgctttccacctgtagctaagtgtaggcaagagcattctgattgatgacagtgtttctttgtgcttctttattcatgcttatccacttggggtaaaagcaccagggtatcttcagaacggagttttcacattcacgtcagaaagcttgtgctctttttctctcagaaaaaaaaaaaaaaaaaaaaaaaaaaaagtcttccctttttccccctcttagaagatttgaataaaagcagagtacgttcaaccttttctgcctttttggttttttcctgccatgaaatcatatctgactgtgacatcacagtgtgttgctttgggcagctttgtgatgtatgaaggcgaggaccttaattgggttaacagagcacaccaggagcggacggcggacgagcgctgctctcccactaggcagttctttgctccaggcagtgtgagagaatcagagaccagctagagaggagctccttctcccggggatttttaactctgaggctttgtcttcttttagtgtattactaaccaatgaaagtaatttttaaaagaaaaagtatataaatgtgctttgtttttaaactgcaaaaaattgggggtgggggtggaatgtgctggcaggtttgttctgtagcattgatttgtgaccaacaaaggaaatgtctacttgtgagacacaaatcaatgcaaccagactgcgaaagtgcaaacagagatgtgagaaaattattcaatcgttagtcttctatggaatttaaaaacattgaatctttcgattgttccaatacaaaaaaaaaaatcactagaagaaaggaagggagggtatgaggacttgttctaatttcgtcaaaggttttctctcgtgattatggaaaggtccggcaaagctataagattcctaaacattagcaatgttgtgaatgattttcagaactcatcaaccatgtcctcagatgctgtcaacagcaaagttgtggaaaactggtagaagacaagtttatgcctgaacttctgctttagtctgcagtaaccttggctgctgtaaactgaagtttcttgcaaattctctgtatccagaaataatccataacaagcaaactcagtacttacatagtattttttatcatataagcatgctacaaaaattaacaaatagattacatgggtaaaaacgtaactctagaaagctaaagaagtttattttgtaaaatttcatcagttcaaataaactgggagacagacgactagaatgagctgaaaacgtgatcatggaatatttccatgtactttgaactgagatttctaagttttaacagatagagtttcttcagcactaacttcaaaataaataagaattttcagtaacttatcagatgtgtgtatgttaaagtagttaaagatgtttcccccccctcatataggttacatttggtttcccccatccttcctcccaacagttttaaggttattagtttgcttagaaatcctattttcagaggtaataaaaaggcaaatttcgatacaatccctatcctatcacagattgtgaattattctgacttctccttttggagaagaggaaaaaagatgatcagatgttacttctctgaacactgaaaattaatgtaaataacttcacagtttttaatgttttcccagtgtctagtcaggccagagttcccattagcagtccagggaagttttctaacttgactgtatatttttgcctccatcactatgatgaagtcagttaccaagactctctcaccttatcctaaaaatgtgctatttctttacttcccaattgtcattatgttagttacattgctggaggaaatcaagggagtgaaatataatggatcagagacctatcaagtaaagtaatcaagaatggatttctggacaaccctgtttaaaataagaagccttgcaataaaagtgcataaatgtttcactctgtgttacacaataatacctcaaaatccactttctggtagttcagatctctgagttacaaccctgagcaaagaagtaactgaagaccttcaagtgtccaaatgagtttcccccaaatcttctaccaaaccctgcattcaagcagtattgtctctacagttcttatttatttgattttctaatccaaagcacattagaaaatacatttagcagagaggatttagaggcgatgggtctgaaaaactgggacagtgacgccagttggctatggcagtggctagtgggctatagctcagtctgtggccgttaggctgagccaagggatgaggccagttctcaccacaagtaagaaaagtgtattcctgtaaaacaggaacaatgaatagtcacaaggatgaccctgtatcatagaaaaaaattaaattacatcaacatactgtgtttaagaaaacaaagatatgtaaaagttttctatgaaaaacatgtttagaatatattttactgcttaaaaaggcaagtttatgtcattaaaaaacattttaaaatatatggaacattttattcctcaatatagcttgcttttttatatcctttttcagtttgaaaaaatatagggattgttttgtagtagtgactctacaaacctgtctagccaaaactactcagtacaaacaccttagaaggagtacaaacaccttagaaggaaggatgtttattcttgaatattttaagtccaggtctcttaaaataaagatgttctttttcattgatcttagttatataatgtatgttgtcatctcgagtaaggcgcagttgctcatatttagctggtttactttgtaatgcgtcattataagtgaccaaaaacatggtacaggaagttgtttgtgtgttttttcattgcttatgcaacttccaagcagaaaatgttcttgagaccagatggtaaagaacagtcaattgcaagttctattctccagatgtattgatgtttcatgtcttcctgaagccagttcaaacacacttgtaaattcaagtcttaattttagtaactctttcacttctgctagatcctatttcaaatgataaagaattaggctagaatatttaataacaggatctctgaagcctgctgtactatagagtggcaatgccatggtcatataattcagtcggataaaagttcattacatgtgcttttggacgtatttggtcactgtgctacaatgacagctaagtgtttacagtaccaaacgtcttttcaactttatcctttccaaaagtgcactttgttaagacaattttaaaaaataacatttacccagtgtttctacttggcatgtagggtttttttttttaatctgctcagcaatttggaagtttgcttggaacacagatgagttaagataaaaagctgttttttaaaaaaaaatgcctctagtaagtaaaaatgaagatactatatctgaatgaatgtgaaaagttgtccctttgtatatttttaaagcttcctaaactatccccagttctcagccaaatgcagcctacccagattgtctttaggaaagtagcaattcacagagatttgcagttagccatgtatcaaactacactctctttagtccctgcttacagctccaccattttagaatatggtgagatatgccagagccctaccatctgtttaatgggctaattatgtttaccacatgcctacttcacaggaataccatgagtgaggttgccaaacatcatacaaatatatatgtttgtatatattgatatataaatatacacataaataaaattgtatacatatataaaagcattcagcatttctgagtttcattccatcttttactctcaagatatatcatggcccatcccttaaacccagccaggtgttgtcagagtttgtgaagctgttgatgataagaccgtcagactgagagggatcctctaactgagagatttggaggaagtgaaactcaaattgtatacacattcctatgtcttcgccatttagctatgccccatgttctctctactaaaatgtagacattttagcttcataattaatgcaattaaactttatgacactgtatgttgctatatccaatgactaaacttcttttaagaaacagaggatctcttctcctttattggaaaaaaaaagtcagactgttttaacacaattcctcccgtacatggctacaacttttctcttacataccacagcttctatattgggcttgttcttaaagctaggattttttttttcctcctatgaggacactgcaacccttgaaagtttttctctggtattctctgagtgcttcctagatacctggtttcagtgactccagttatcacaaggactaattttcacttgctatccatgaaaattttcgctgggtcaaactaagttgggtcaaactaagctgcttcttggaaatggggcttatgctagtcgtgagttgtgtccagagggaattctgagcagtaaaaggaggcaaactgagggcattctaggtgaagggaattaaaccagcagagaatcagggcacagatggaaaagagcgagtcatgggtaaccagagtgcctagtcaggatatgatataagctccgggtattgggttttctgtgtagctcctttgtttatgtaaagctagctcggcaggctctgggccttcttggctttgaggatgcactgacctgagagctatggggaaaaatagccacgtctgtacaccagactataaagccaatatgtaccattctctttgaaaatgaaagacaataacatatgaaactattattgatataagcttttatttagtcttttctaagataccagggtatttttatgacctgttttcttcccctcggcgttaggatgttttcttatactgcttcaactgaagtaaattattcaaacagagctgttttgttttatttgtttgtttttgtttttgcagctttatgcttaccagggacttcataaacaagttgaaagagaaaaaatagccaagacataaatatagaaataacccaatcacataagctttcatgagcatgggtgagggccttgtgggaaggatgaggaaaaatctttattagtaccagaatgatcgtgattaccttaggcataagtctgatttgagaagagacactgatatacaaagaaaggaaggattattcccctatgatttgtccatgtgtacaaggaaaaatagcttcagtatttactatttgacttcttgagtccagaaacctaatactcactgcaaactgcataggcacggagcaggagaaagcaagtatttaccaaaacaagaggaaagaggaattactctttcatctcttcttactttagaatcatcaaatgttattactggaaagaatcttaaaaaccatctaatctaacactcccacattatatatgagaaaaatgagactcgagagaagtttcatgacttgcccaaggtcacacaacagattacaaacgtggctggggacccacatatgataaataggtgcccttcatttcttcagtttctccataatcattttagagaattatttgacttatcccaccaatgttgttttgtatatctggattatcatctggcttctcagttaatttttttgaagtgaagtttgctttataataactgccagattctatagctgattctaaaaattaaaatgtgttctcagacatatcctgagtgttgtacaaatatggagacgctcactagatcaacatgtatgcctccttattttatatgaatcctataatacctataaacgtggcctgatcatattagactcttgaagtttctagagttccagatatttgttggagcatataaataggtgagagcagatttacgcatttacccactctgagtccctgagacgttcctgaactgctgtgcctttgtaagtcagttattcccactgctatcgatatcaccagttccaattattaccaatatggcccattactacagactgatttcttactaggttcaaaaccagctgtacttggtgttttactgatattttgttcagtgttagaggagaaagaacatggtgagagtctggcatagcccagctcccttctgtgaagaaagagtccatcactgacaatagacattcaataagtggttatttaaagaggtcgaaaaaagcatccaccatttctctatttcaaaataatcaatcatttaaaaatattaactacaagcttctgatgcaatgttgtgtggtttgttgtgccacatatggttatgatgatctacacgtcagctacaatccagaaatactctcattgttacaatgcaaaataatataatcatccacttttacattttaaatgtgtctggcccaccaagtccttgcttaggtgccagacacaccactgtgaaggaactgtctgacatagtatcctgaaatttcgggtaagtataatcatctcccagatgcatagaataagcctggtttttgaggcaaagagaagaggcaaacctcctgcccttccagaagtcagaaccattcagcaatatattcacagtagctaggggggaaagcctttgtgaagaaaactgttgtgtctcatggctgtttttattaaaacatttagtccaccagctttccaactctacgaacaatttaattcacaaagcacatgaaataagcagaagaatctagtcccaacagccatgttccacctctgtgatcctcgtcgtgagttaggatgatttagtcgtcaagatccctgctgttctgtgcttggatatttgtgaggaaaacctagaattcatcccctttagaagccatgtccatatggcatgcagcaaagaccattagagaacagtagtaggagttttgttatcaaatccagccagatttgcagataggaatactgagaaattagtatttttccttcctcttcttctctcttttcctttttagcctttttctttctcctgtttgcttcttcaattcaatactcctttgtttatggatttggagagtactccaaaagcaaataagccaatcaaatcctgtttggagggagaacagccattttgacatataaccatctcatcactcctttttatatgcctaaacaattgaagagcatgtagcatagccaggtgctggtcctcaaagtgggtgtgccctaaaacattctttggtttgaactagtctagtccactgtttcatgttactgaacaatcaaaagagaaaagaaagtttttcttctctggttctagaccaaatgactggcaggatgtgattgccatctgtaattttctgcgaagtccttccccagtccaatttacatgatatgtacagctacttcactctgagaatgcacactcaaaaaatacagcctttaagtgatttttcctagcatgggcaaggtgaagcagtgaggaaatggacgtatatatgttatacatttatattattattccccataaacttttaaacttcctatccagcatttgtatttgttctcaaacaaattggtagtttaaagaaaaacctacctttgtgatttttcaaaaatcatttttcagcctctcctattatttttttttatttcagtagccaccttaatgggtagctgagtggggatcaagtataaaaagacctcatcatgtattacaagccagagagtgtactcatgggaaaaatgtaagtcctcagatggaaagtcatctccgtcaaagaaagtggctcgggcaaaagtgcctgacattacatagtctgcatggtggaacactgcagccatgttttcagttgcctttcactctctggaattttatgaaatgatctcggccaagaacctttggaatatcactctctggtcaaacaaaaaagaggacaaaaaaaatcctttgaaagttgaagctagttggtacaagctagcagacaatccagtgaaattttcaccccactctgttttgggggtttggggtttttatgcagtataagagtgttagagaaggtgtctgtctggtatggattgggatactttcaaatactttaaagaagaattcttgttttctacagtttattaaactagctcagctaagtatattggttatcagatcccatgatgcatgattattcaatatattttaaaacacaaaaaaattcaattgtgctgtcccctttctccttctgtctcctccctgtctgtctcactgtgctgtgaagcattgggagtagtgtgtgtgtgtgtgtgtgtgtgtgtgtgtgtgtgtctgggaggtagacagattccctacctggaaatggcttgctattattagacgttcagttaccaggggttatgtaagacaattgaagctctgttttttaacagagacatgattcatgctgcttgtagtaacagtaaccacctccaaacgagacagaaaccagacacagacaaaggctggagaaatcaatgccgactcggtacagccattctcctgataccctctgcctttcaatcagagcacttaggttatcaggagaggaggctcctgctaattctggatcctttttgtctcttggggctgccaggtgaaatcatgtgggctggagctgtgtacaggagaaaacgggtcctcaggagcagtgacgtctgacctccttccctagggtcccccagtgtttcagacacacctggaggaacagtgattgtcacctgtgttgtggctcaggattcactgtggcttctactcagaaaggttggaacttgagcatttggctcacccactcaagtaactttcctcaagtgattctctgcagcgtgctgggagaggagaggatggagtgggatttgagctgctgccagtgctttattatagcttctcctaaaacctgaatggaagtggactggctgtcagttcccacacacattcgggaccctttcctaaatcttccagacaacattgattcagtactccacactatacaaagcacttccacatggatcagcttattttagcctcacaactttataagataggcaaagcatacattattgtcaataccattttacaagagagagattttacagcttacaagtattatgccattcattgattccttgctcatgactttataagtgagaacaataagactcacaaaagttagtgacttggccatggtcacacggctggttcttaccagatccaggaagacaaggcagatcttctgattctccatctagtgctctgccccagatttgctacaaagcttgttgacaaccatggcattttttggggaaaaaaagcattttctgctgaaaatcttggttttagattaagttctactactcattagctagcccgcttaaactgccctttccttcctcttcaccccatccacctcaatctcctcatctatgcaactcatgatagggagaactcatttttagagtgttcatgaaagtaccacataatctttaacatgtctaggtcaatatatataaagcattgccaatagtatctccctgcccccaccaagagtgaaatccagcaaagagatccagagatctcaggcttcacccagaacataaaagtaaactatttatttttactacaaaaagaagaaactcagatactttattgcagaaactgcccatggctctcagaaaatagcagtcttgccccggtggcctgttacacacccaataggcaggccacccttcattttcactctcacatgtgtaaattgcccagaaagacaattcttaagtattgacatgacaggaaaacatctaggccatttagcttcacccacccaataatctcctgcaataaaaattccaatttaaaaaatacttattattgattactactaataaccaacactctgatacactgttacgaattttaactgaagacggacacagaattttatatttatgaaattttaccattatccttctatttcacatgttaaataatacaagctatacctattttaaggtaaacacaagtaaacattcttatttataaaatagctttttattaaattttttgtttgtataccgctttatatccaggaaggtagcaaaatactccacaggttatactctaataaaatgcactttctcttctgctaaaatatgaaattgctgcagttttaagaaagaaagctatacttttctctctcacataataaaactccctgactaagcatcaagagaccaaacttctagtcgtaggcccactaaaaattcactgttagggaacctgctgagtcccaacttcagataacatctaatctgaaaaactcagggccccttaacatctagttattacacactagcccgagacaacctgccctgcgctgttgtatgttgtgtcaataaaagagctttatgggaaagatggaattcattatttggggttttatgttgtgccagtcgttgccaagctgccttgaattcaccaatgtattgtgtctccagactgattcaaagagatagaatttggaatgtgactagaaggcagtagcagattctgtaaatagttgctacacattctgtataccaggcacaatagcacacagtggaacctcagacaatacttaccctgacttccttaagtaggaaaatatcctttttcttttcatcaagttaccatgatttaatgattatgaatggtaattttaccattggtatattccagtgattcctttcatggatcacttgatgttcctagattattttaatcttatcgccatttggtgttaactaatgcaaattcttactttcacctaagaacggagctgcctttgctcttctgtatctagcctttatccacatccttagacacacatggtatcattttcagggcaatggcagtgatggcgggtagtgtttcttcccaatattgtgatggaacatttcacctgggctgttagcatcttaaactattccaatagctacagaaattgggttttaaaccatcatgtcttaatgccatccatttctgtttatattaaccgatgacatggttataacatcctactgtgctcaaaaagctggggtctctgtagtgtataaaacaaggttcctacccaagaggatgtacaccctcgctaataatatagcaaacaggcagtaaaccataaccatttattgaagtacttaaaaagtggcagaaaacattatgggctaaagcagtcttcacaagggaaaatttcataaaggatacatttttatatatggaccctgaaggagaaaaaagtcctatataattttttgaaaggtgataaaggtattccaagcagccaaactggtatatacagtagctcagagatagaaatgtgcttagtctttctgacaccctataagttaaccagtttagaccatgtggagtattaatggaaaggaaatctgagaggactcatttgatagggagtcagtgaatttccgagcccaggcttaagagtttggaaccaggggaatcccttaaagcatcttttcccgaagcatattctgaggttaaataagtgttccattaaaaagggggatgggggagtctgtaatccggtaagcctggacaaagattaggcttccagcaccttaatatcctgtgtacacttgcgagtttgaaaatagaatatatagttttcagtgtttcctaaacttacttgactgaggaactttttttgagatgcatcttgaagttccagtatgaaacacactttaagatacaccatctgaaaagatttttgaagggcaggagttgaatgcgggacaaaaaaaaaaaggtatgtggtgatgattaatctagtactattagaaattgatatgctatcagctacagagaaagtatccctgatgaaaccaaaggaagataaagagaagtagagagaataaccttcaagatacgaagggaacatgggaaaagatatatcctgaggaaataaaataatgaaaattcagagatattagaggagatgagagctaataagcttaccacactgcatggtgtagatccttttattaaactaggatgctagctcatcaactgaaaaagagaatgggacttcataaaggagaacaaactaagaaaaactgccataggttgtacctggaaacagtgggcaggagcataggtccaggtagcatgcatgtgtagccttttgttctgagagtgggagcaaatggagaatggtgatacagattcacagttgatgaatgtaaaaggaggcactgcacatagaaagttagaaaaggaaggaaatctgcatggttactgaggacagtgttgaaatggttgatcatggggcaagatcaaactggacaaatacatctggtaaggccaactggggcctactaatgaaccagctgaaaacaataggttccttgggcttctgggaaagtgagttcaatagctgggtgtggaacatctgatgtcaaatgtgaggcctcaaaagagtaatttagaaggagtatgagagctaagaaaaggggtgataaagtctgttgaaaagaagtgttaatgagtttttggattaaattattaatacagggagggaaaacataaatcaagtgtagaaggttttgagaaatttcaagaaatattcaagaagacatgagagagccatgaagaagaatctagcctaagccaatggtggggatcacaaatgaagaggagtggaatgaaggcagatcagtggtttggtgattgtgagcctggtataggttaagctctagaacatgtggttagaacctggcccttaactctgctttgctaccctctgccttcatgactgatgaccaataactgtacctttcctgagtatcagtttcacctccttcgtctataaaatgggaatataattcccaacttcaaagagtaattgtaagaaaataaagttatctgtgaaaaggctcaatgcctgccacacggtaagcatttagtcagtaatagccaaagttactattgaagtgatgggagcaggaagagggaaatgatgttcactttgggaacagtgacagagtgtgttatctggagtaatgccactgtgatgtttctctgtacctttttttccatttaccacaaactataatggttaattcagaacacatactcactgtaagaggtaaggtataggaaactctgataataccaaataaaatgctgtgtcataaatcatgctcatgttagaattctcattacaaagtttaaaacgatcttattaacatgacctgtggcaggctttctggataagaaggttccagtatccggtgacataatagaggggttcccatcaccaggccagattcattaataccagaaattcatgattgtgtgtgtgggtgtgtgggtgtgtgtgtttacatgtactctgatccaaaagatctcttattttaaacaagaatcaactgtatctgataatgctaacgctcatggcatgggatgtgcaacttatattaacagagtttatgaactgtcaaagaggaatcaagaggtctctatggagaaaattaacatagatttaatgtgacaaacagtgggattgtgattccaccttgtgttggcagggccatcccaggggtcttcaagccatcagaggtgtttcttatggacatgggtattaactagtggttaattaaggaactaaaacctaaaaagtaaaatagttatcacagcatcagtaagctgacgatggtgttcctgattagtttatctggccgtgatgtctttggtgccttattcattaaatggttttctcaccactttccagagaggtggggctggtgacgtagacttgggaatttgtttcgggtaattagctaaaaagttaaaagtcaaatagacttccttaacatgtttaatggtttaacaggttgatgagctacttaattcccacatcttccttctcaggggactattagagttttaagggaccttaaaaatcataaaaccaacctcctctttttgcagatagaaaagctgagccacctagaggttaaatgtctcatcggaggtcatcagctagtcctgattttgctttctcttttcttatcttacactttctaactcttttttttctaacattgtattccccacaatgacctctctgctaaatatttcttagatgtatcctttttatgaaatttgctgtgcctcaaattatgatagtgggcctttgccaattagtaacccgtccccactaactcaccactacatttggggcaaagaaacgagggaagtggaacaattttaaatttactatgatctttgagacagctttatcttcacctgggaattgctgttagacaattaaggttagtaaagctcattgaatttctcagagggaaggtgttatttgaattattaccagataattattgttaaaaataacaataatgtaaaaaaataggaactttacatgttagagacattatcattttgaatttccagagagaggggaaaacccttggggatctaaaaacaattttttgacagtgtgctctatgctaagaactccttgaattctgtgtaatgcctgatgacctgacaaactggcctagaatcagaagccagtcggctggctgtgtgaactgttagccaagttatttggcttgaactgctccttcaaaaacaaccctagtagaaaggagagtgtcagaaataagacctgtggtcccagaccagtagcatcagcatcacctgggagcttctcagaaatgcaggatcacaagctccaccccagacatgctgaatcagaagccctgggtgattcgtttgttcattagagtttgagaagactgttagaggacattctcatctgcaattagaaaggaggagggaagggactatacttattggcagtttctgaaatagttccttctcctggagtctgtgctcccagatctttccagtggctctgaaccatcgtggaaataagcatcttccttgtactgtgatcacagcgggaactagaaatgtgtcccgtgtccatgctgcattggaacagttgttatatagtgaaaagagtacagatttagactcagagagatctgggtttggattctggcctcactatccagtagctttctaaacttcgacctgttacgtaagcccattaagtctcacttttccttatctgtaaaatgggtatactaaaacatacaccatagcattgctatgagggttaaacaagaacatactcatttataaaaatgcctggtgcagtccctgataaaatttagacatccaataaatgctagctgttattgttactattacctttcttgtaaactttaatcatgaaccccccatctataattttagaacgatgtggtgtgatttcctaggactgggacaggccatactcaaagtagacatctgcagaaagttccttacattgatatgtggcagtgtatttcataacagctctgctctctaagggcttccaagacagatctgcagaaacgccaacaatgaaacgggctgtagagaagtgacctactgtctgttcgcctctgacaccatcaagaaacttgccagccgggttccaagagcagattctttattacagtgatgatgtaagaagcagagacaacagctggattttcaggttctagggagaatttgtggcatcagcagcccctcaaaattatcttttgacttaaaaaccgagtacactggatatgaaagtcattaaaagagaataaatgtgaaaccccatgaagtcattctcaccgaatcttttttagagtgtaaccaccctttaagcaataaaacatgacacaccatgcagtggttctgattaatagacgctcaggtgtgtactaaggcaaaaggggaaagaagatggagctaggtgacactttgccaaaaatgaaagtaagattatagcagcaggatgtgggactgagaaagaaggatttaattaaaggacagacatactatggttgtattaattataaaatgcacaatgtaaatcagattttagatatatttaaaatgtacatttatataattacacaaaggatttgtaaatttgccagataatttttcactgcaatgtactattgatgagtgatttcctttatgattttaatgtagttgccagggggcaaaaggagaagtaagttctatctggtgaagtgtcaataatctgtccagccttatgatgggttagaaagaacaatgaagagctcttgagcccattttgctgtttgtgtggctgctggggtgatgctatttaatggatgtctcaatgcgtagcatggctccaccatactggccaaaaagagtttgattaatgctacctaccaaggttttcctctggtgagtaacagtgagtcaagcgctcacctgggagatgcagatgaggtcttgtagtattggagctaacatttaagagctgagcttttctggccaagtaataattactgagattccctggaaaagtctgttttcctcacctaggtaaacactattatccccacagcatgttttgttgggcttttcatctttgggtgagagaaaatgattctgtttgaggataaggatagagaagagaaacaactaatgtttcctctactacaagagaagaacaaggcaagaaaatttgaacagactcagaggcaattgtctatgcatttctacaagtaaattagtaatataaggaaagaaaaacaagtaaacatttaaacaaacctagagaatgagtactaggctaagctaggtggaaaaagaagtgttaatgtggcataatagcagattgccaatagtttgtttctacaaagtaatgaatttaaccacggaattactgcatgttttcaccaagaactccagctgaacacacagcttttccaaagcatgagaaatttctttattcttattttcagcctgagtttatcaccccagtggtatttttaacattttatttgtttttaatttttgtgggtacatagtaggtgtatatatttctggggtacatgagatgttttgatataggcatgccgtgtgaaataatcccatcatggagaacggggcatatatcctcttaagcatttatcttttgtgttacaaacaatccaattaccctcttttagttattttaaaatgtacgattaagttattattgactatagtcactctgttgtgctatcaaatagtaggtcgtattcattctttctattttttgtacccattaaccatccgcacctcctccccagtggtgttgacagtattgtcataattatttctgctggtaatgttagaaaactttgcttccttgttttttaaatccaccctcattttttagacaacatttaactataaaacatatttattagttcggtttgttgaagcaaataaatgaagcaaatttgttatattttggaacacaatatatttttgcaggttacacaccccaacctccctctctctggtcttgtcattactgatgatctgttgggcctattggtgccaagtaagcactgataaatattagtctgtggccttttatgtctgttatccttgcccagccactaacaaggatgcgaccttgagcaagtcagttcccttcatctcttcgtctgaaaaatgagggggttgaagcagatgagcttttaggtcttttcaatttagtccccgtttctatgactcaaggcaagagggtttattctttttaaattcagttcagcagattatcagcctagtgcaaacttaacgtgcaagaagtcatggcccactatagggtactcagagtaaaaattgtctcagctttcaaagggcttatgaagaaggaagacaaattacacaaataaccattctaattggtagaatatgcaaagggagtagtacagaatgtgctaataatatttaagaagggcactctcctttgtgaaatgcttcataaatgaggtggcatttggatggcccttgaagaagctacatgtagacattgaaagaaaggaagaaataccatgaacatggtaggaaagagtaggactttgctggagcgtagaatggagtgtagagataagagtgagaaactagattgggctacattgtagcagctttgaataccaaactgagaagtttgaatttaatccaataagcaaggaggactgtaagcaaagaagtgatatgtttagaagggcactttagaaaaattaatgtaatgtttgtgtgaaggatggacaagaggtaaagaaaaactggaaaagtgaaaccagtcaggagcttttcatagatgtcctcacagtaggtagcaaagggagaaataggggctggtatagaaaacaggtattgattcaggaatcacaatcagagtagaatctacaggattgggtagctaattggatataggaagaaaaaaaaaacggaagaattgaagatgactccccagctgtaggcccacgtaactggatgaagagaataccaatggcaggaaatgggacgtctagagaaggaacagattttaaaggaaagacaatgaattaagttctaaactttctgaattagaaaagcctgtgtagtatttgatggcgatgtgaacttctcaaagttagagaccctgttgtattcatccaggtgcctcatagatgctatataaacactgaatgaatggacaaaggaacgaatgaaccaataaccagctgttatttagaatgtgggtgtgcagctctgtagaaaagctagaactaaagatagcaatgtggatgctctccatggagaagtgattgttgaggtcagggaggactggggtagacaaagcctgaggagaggatctagaggaatgtctacatttagagaacagaagaaagaaaataagccagtgaagaaggcagaatagcagactgaggtataggggaaaaaatagggtaattcggtgtcctcagggttagagcctatggaagaaaatggagcctttgcagtgaaggacagagggaatgctcagaacatgcccagatcaatgggtgtcactagaatacattaagaactaagcaataaagagagagactgaaatgaaatcaagaatatcagaaatgtggtaaaagtacacaatggaacactattcagccttcaaaaagaaggaaatcttgtcatttgcaagaacatggatgaatctagaggtcatccatgatatatggggaaaaaataggcttttttttgtactagaaaagccaggcacagaaaaacaaataccacgtgacctcacttatatggggaatctataaaagcttaatttatagaagcaaaaattagaatggtggctgccagacgctgaggagacatcagtcaaaggacacaaaatttcggttagacaggaggaataactccagagatgtactgtacatcctcatgactatcgttaataagaatgtagtatatattgaaaattactgagagtaggttttacgtgttctcaccatgaaaaagtgataaatacatgaggtaattcttttttttttttttttttttttgagatggactcttgctctgttgccaggctggagtgcagtggtgcaatctcggctcactgcaacctccgcctcccgggttcaagcgattcccctgcctcagcctcctgagtagctgggactacaggcgtgcgccatcacgcctggctaattttttgcattttagtagagacggggtttcactgtgttggctgggatggtctcgatctcctgacctcgtgatcctcacacctcggcctcccaaagtgctgggattacaggtgtgagccagcacacccagccggtaatgcatattttaattagtttgatttagccattccacaatgtatacatgtatcaaaacatgttttataccataaatatatacaatttttatgtgtgaataaaaaataaataaatataataaatgaaaaaaaaaagaaaaggatactagaagaatcaactgtgggaaggttgaaggacactgtttctacttccttcccccactgtcacccacaactcagcttctaagtcagaaccacaaaatcagctccgcccgcactgacagggtactgttgatgtcccaggctgcacaggcagttaggtgaaagcactgaaaatggagcctggacaacatcctctccattctcccttccgtacctcgccattctctggtgcaaagatgtagaaccaaacaaccaacctctcactcaagtcccaaagttctttcctatcaaaataaataattgccatcaccatcacctgttcatttaacaaccttatttttgttttttgtctgatctagatgcagccgctctctgctccctgccccaatgaacatctgcactaggcccaagccttggagtaatttacctgaagagtgacaccattgattttgaaactactgtgagtacattatgtctccaataaaaggcttcttagttcactttgtttaatacacacacacacacacagaaaattgtgaaagcaggcaaaattttagatggcttcatttcttggatcagcagggtaaccagactcagtcctgaggtgcccacagcggttctcaacttcccggctgcagtgcacaccatgtgcattatcattccctcctggccagatggctgtgctgagctgtatctgagcacaccttgcagggactggtgctgttctgcttggtcatctgtgcctctatgtacggtggtggcagcttctcctaatctgtttgcttctcatcatccttccgtgccactgttgaatctcatggtagcttgtcatttcttgccaccctggtcaaatctgtgaccagcagctttgcttggttttatttacctgttgtctgagctgcaacccatgctgttgtctccttgctgcccttcccttggagctctggcctccttccaccacatctctaagccacttgtatccagctcacctctgctctctggatgtatgggtctgtgtagttgatttagttcccgccatgcaaggcatttatgtaggagaagtagagaccttgcaaggaaaagtacagaaataatttggggtaggggatatgatacctatgggaaaatactgatgaaagtttgatatcaagtattcattaatcattgctgaaataacagatgaatatatgctattttccaatagaaaagccagtcatttgaattatttagaagttctgcatgcaaagtaacttaattacacattttaaaacaataactagttgttatattcacaagttttcctatatgttatgaggcaggtaatgggatggtgttttacagacttctatgttactggaaaacgctaaacctgggagactaacatccctcttaggcttcaggtaggatatttacattcatatttctatgtctttagctattctggtataaatcaaacctaaagggatgaagccagagttttgctttattttgtgttgcttttttacctttaatgcttccagtcaactgaatcatagttgatgggggctgctgtgtaggtgatagacaggcctgcctttcccggaggggaatgtgttctatagtactaataggactgagttactggggactaaagacatgacagaagatcaaacatagtttcttcagtccacacccacacaaggaacttacttgtatataccttcattcatccttaagttcaagtgcaaggaatacccgagaaattcccacatctggatagttttctgagtttttcttcatcacagagtaactatgctgatacagataacacagccttactatgatgcagatgggtttaaaagtttctatatcctttaagagggaaaagagttcttatcactcttaccttcctgtgctacagagaacccagatccagacctagaaatcaggagctgatgttgcctacagattacagagaagtccacaagtgagcatgtattcctgtcgtaggaagtatttcatctgtgcagaatgccagtgcctgcttttacttctcatgggccctagagaatggacagactgggttataatctttgcagtctttgctattcagaaacttggctttccaatgcataaaagagaaataataataataaaacagaaacttgctaggtgcaaaaatcaataaagaggataaaaaattaaaatgtgaatcatttacagaagtatatctcttctggtgggttgacaatgcttcgggcctagtcacaaggcttggaagtgggttggggaggcacatattaaattttaatacctacccacccccccataccacctgcacaataatgctcagtggccctgcctacttaaccagattattgtgataagtcaatgagatgatatatatataaagtctgtcacggcagaggtgagtatatttactcagtcatttaaaatttgctgaccatttactatgtgccagacactgttctaggaactaggaatatggcagcaagcaaaacaaacaaaaatccctgctcggctgagcagcattctcttttcttgctctgtgaatggcaattcgacataataggtacatggaagctaagacagaacctattttattttgttctgtctttccttccagaaagtataattgaaagtataagagagaagaacacatatgttgattagtcttgccaccccattctacccccaaaaaaaccccagaaccattcttttgccctgatgtgtgacccagaagactggccttctggactacattacccaggctctcttgtccttgggcttccctttgaatttggccaaaaggagacatcagcaggagatgtgaaagtgggggaagagagaggtcaggaaatgtgttagttcagccctccttcccaactccaattctgactggactcagaattcatcaccattttacttgccccttcagtttaaatggtttaaagctttccactactgctagtacctggcagtctctactattgctagtacctggtgctatctctcttgaggtcccttaacctcatctgcagctccaaatacagttttttcattaaatcctctttagctaaaaactttgcatgtgccatctatttttgccaggatcctgactgatacagttaagaggaaattatactgaaaaaaaaattataaatcagccctgccaaggttaaaaaaaataagattgagaaaataaaatgtgtttaatcactaaaatatcttaaattgatgtgaggacatcagaccaggtagagaaatgataaattgcaagaaaacacgataagccagagtcccataggttggtctcaatgaatagaccatagtgtccaggcttgatgggcttctataggctaagtgcagcttgctcaaccctcagcttcaaggagctcatggtgtagtgtagccacagcaatgacaaacatgtgagcagaaaggagatgtcaggaagtatacagcaagatcaaatgttgaggaagagattgctggtcctaacattgtttctgcctttgctacaataacaatccatttgcccctacccaaaatctagatatctaaacagattactgaaatgaagggaaatgtcttctttttcttttgtttttttcttgctccaggctgcagtgcagtggcgccatctcggctcactgcaacctctgcactcccgggttcaagcaattctcctgcctcagcctcctgagtagctgggactacaggcatgcaccaccatgcccagctaatttttgaatttttggtagagacaggatttcaccatgttggccaggattgtctcgatcacttgacctcgtgatccgcccgcctcgacttcccaaagtactgggattacaggcatgagctaccaccccttgcccggaaatgtcttcttaaagctaacatgatgaatatcacagaactaacaatccctatgagaggaactaccattattgagctcttaccatgtgccagcacaaggcaaatcactttacatggcttatctcatttgttcctcacaataaccctaagcggtaggtattattattcccattttacagatgaggaaaatgaggctcagagatgcggagtaatctacccaggacatacagctaataggtagtggagcgcagttccgctaccacccttattggggtggtttgttaccacctaccctttctctcctgcccagatactaagcctatttaatgtattgttggggaaaagagtagggaaattgttacgactccagtaagattgggggaggcatcactggtctaaattatcatgagccaataggaggttccaactaattttttcctatctgataagtaacaggcacattacttaccagataggaaaagaccaagctgataagtaaaaggcacattaacgtgcaagagagggtgggagcccagtgaagagagaaaattgggatagggtgaaagaagagagcactctcaacaccctggagactgctaagagctcacacagataaaatatttatttttccatatgttgcagaaagcattgccatcactgtatgtgtgcaatatgtgcaaaagagtgtgaaatatatacatcaaatgccgccgatctggttaatttccatgcatttaacatgcttaatacctaccatatcatcaatatgttttaatgcatatttctttccacatacaatatggtctagttaggaaagagccaacatcctccacagccttactcactgctatgtttcagcctaaaacttcttgctggggccagcacaatgagagttaaaaaccagaaggctctgctggctaactcggccgccagtctccttaaaacacactcccaattcttgaagcagccttttctcataacagaaatgtttgcagtgaggagatgaaaatgtttttgttctccttggacaattgagagatgttcagtcagaatgtcagaactgaccgttgaaaggcgggtgcctgcggccacgcttttttgccttttttttttttctttttttgaatgcagagctccaccagtgtggcgggaggaagtgcacaatgattggtctgtttctctgtggaagtgttcagggtacacccagttttgctttgcatatatttgcgaaacatctgcccttttcttattcttaagtccttccctgtcaccagccccctttctttttcctggttctttctaagcgggggaaggcgggtctaactttttcattggagctttcattttccggttgaggggcgacttcatcagagtgtataattttaacagagagagaggaggaaggggctggagagagagagagagagaaaatgagagagagagagagagaatgagagagagagagagagagagagagagaatgagaactgaaaagaaagagactgagaggccagagcctggcaaatcaacctttggcatggtgaccaggaggaaggttctggtcgggagttcgcctctctgaaatccgctggagtcagccagtgtgctgctgccctctaaaggctccagggaatagtgcatcgccacagaggcttgaaaagacttgccctcagatgtgccatgtttataattctttttatacagcctcaaaatgtattttcaactaattatgacagggcttattctttcctccttaataaactatgaactgcaaaaatggggtcaattcacagcacctgtgcatgtctagacgtaaacgggtgctatgttttagggtttctcagctccggaaaaaggagtccgaagaaccattagagagggtgagacaggacatgaattgcttctgaggatggtgagcagttctctattatctggacagttgggaaacagcccagtggtataagggtaagtaaagtgatataagacaaataagggggtgagccaaaaaggttgagttgctaacatttcctgtttatagaggtagctccaatgcctctgtgctatcaatattctcccaaagtgatcactgaggcaacaggagggtgtgatacaagatgtcaggtaggaaacaagagcgaatctagggaaggaaacaagggcattgatatgaagaacaatataatttttgcagtgttaaaaataaaagagtaatatattggtggttttgctatgtccttatgtttgaaagaaagctttcttaattttctgaagcacacatctgaaagtatcctaggccctgtctatgaatatcaaaaataaacacttttttctgctaggtgacatatgtcattactgttttgaccctatatttaaatgaatcatgagggccagcctagccttactgagcaaaatagtcctgctcttattaaatacccctcacagacttaaagcaaaagcagccagtcaggtagttttgctaccttgctgcataaaaagtaggaaacttaattgggattcagactatgaccgttcttaaaatacactttaatttcagcttcatttcattctgtccacaatcaattattgaatgacagctttgtctaagctacattgcttaatagtatagacaaggcagtaaactctgggagggaaggaaccagtcctgttttattctttagcccatgttggcacatcatgggtacatcataaatatttgtaaaatgaatatgtaaatgaatgaatgacaggagagaaggaagaagaaaagaataggtgaacactaggaatactaaaataactaagacatttccttaccttcagagagcttacagtctcacaagagggatatgcacataaatagccattattgaaataaaattgagtgagtgaaataagattaagaaaaaaaagagcttaggcatttcggagaaagacctagggaggaattcactgtggggagtgaagtcctacctggcagagaggaatcaagacagttataagatgaagacaccatttaataagtatgaaggataataagtatgatttcaacagggcagagatgaaatatgggatattcaaagtaagagaaaacttgagcaaagatgtagagcccagaatgtagattcccaggatgttctggaggatattcaagaaatctgagggtacagtatggccaatatacaggacacatgagaaaagttagaagagatacggaactgaccttgagtgtcaggctaatgtagtcatcttagatttagtgaatgcaaagaaacaggactagaggagtgaaagaggttggagagccagttagtaaacaatcagctagataaaaagcagtaggtgattgcagtgaaattggaatggaaacacagatgtgagaaaaaatatgaaggaagcagaactgtaagaacttactgatgaattggctttaaggcagaggaaggtgtatagtgaccctgaggtttccaacctggtggtagacaacagtgatagagatatggaccttagagaaagcattggttttaataaaggagttgggctttagcaactttgatcttggctacatctttaaactgaaaatcagaataccagctccttcagggtccatgtagacactcaagatttgggggttactcccatagtcaccattcaaaaatcaattgataaggtcttataatttgttgcttctcttgtattggcttcctccatactgaaaaagatgtctgaaagcctcacctctattctaatctttgccatgccatctctgcctcctgccctctgaagaaacagattttatttcacaacctgttggactgaaaacacagcatactaatcataacaccatattctgcgagggcagatttaactacccagcacaacaaatttaaatacaaaatattctgcataacaagtacattaccatgctcacagaaacaagggaaacatggaaacaaatctacttacaacaaattctgtaccacacatagtcttctacaaataaaataaatgctttttctggtcatgtccacataatgatagaaaaagacacaaatccaagggaattggagaaatgttcaggaactattactaataaaccagtttggctgtggtctagggtctgtgtagtataagctaagtatttgttaatttcatatcagttgcattgtcctggggagaggagacctgagctgactgatagctgtgctgttttacttcctattcctgaccccatataacaattagtaacaattactttctaattcccttcacccttctcttcctcatgtcccaaacacacaatcacaccctaaactccaggacgatgcaccaaatcaaaaatcttaggcgtaggatgagtaaagagttggagtagaaaaatctctgcatgacaccttccctctttagctactagaatctaagctcttcttttcacttttcacttgctactctaacagaaacctcccatcactaccccctcatccgtacaggctgcaaatttaaattgtgatttgaaattttatttaaaataaaatcttaataagagcaggaaagttgaatgttccttaatgtagtccatgagtagaaatttaaagttggaaggaacctttaaggccttctaatccaagccctttattttacagatgaggaaactgaagcccagagaggtgaagtgaggtgcccaaggccacacagcaagttagaggcacagctagtacggtagctcaagtctcctgactcccagtccagtgctcctcccattactccacgagtcctgtctctaagcttcctgacaaatgctagaacggtaaaacttccactagtatttttccagaccatgttaaaactcctaaggggggaagagggatgctttcttggataatgtcagccatacgtagctcaagctgtctaaagttctgggacagggtctttttatgcagccaacagagtccaaatgtggtgctgtttgcttggcccatatgctttcatgtgttcccagttaggccattactggagggaaaaaaaacaagaatcagcttgttttaaaacaagggacatactggactccctcccatcccccttcagaaaaaaaaaatcaagttatctttaacagattctaaaaatgccttttcccaaatatgcagtcagttccttcaaagggccctttgtttattttcaggaagaaacccaagacagctgaaaaccagaaggcatctgaggagaatgagattactcagccgggtggatccagcgccaagccgggccttccctgcctgaactttgaagctgttttgtctccagacccagccctcatccactcaacacattcactgacaaactctcacgctcacaccgggtcatctgattgtgagtacaccactaaggtgatggtgtctttgcagtgcttggagtagtgcttctaccctgggttctggcttttctactttcagagcgagctctttgcatttggtcttctaaagcagccaaaagtaatgtgccaccattttcattcagccaatatctataagtttgcaaagctagagtgtatttaaaagccaggtgacatgccatttggccttaaagggctgattaattacataaaacacgttcttttcataacactaacccagaaaatgaagttttgttgctggtatccatttattcttgatctggataatggcacttccacaattactaaattgaacaaccaaatgtggacctcagaaggccagttagacacaaggaaacatccattttgaaattacataacacaagtcagatttgcattagttattggagtctcatgtagcttggctgaatttctgtctttccagtttttaatttattttgaagtggttaaaggatagcataaatttacagaagaaaagagaatggcttccaagaattcagaagccacccagacttcacacagccaatgagaatccaggttaaaaatattttttaattaaaaaaactgcctaagggctaaatttggaaatgggcagcttaatgagatcgtcgctattgaaatcacttctttgctgtttatttttgccatcttcccactaatctgggagtcacttcttctaattctattttaagcaagttgataaatcacgtttaggagatttttttctttttctgaaatgtaacccaatacttcagagaaaaagaaacatgtgtgttgacaatggaaaggaatgaaataactttggagtcgaatccaaaagaatattccttttagtcttaacatacccaacaactcttctgaactgatctccataaaggatgtctggtaacatgcaaataactggcatattcttctttaaaatgagtaacataagacctgcaaagttttatttcaaaaataaaattttgtccacaaagacaaaaattattaggaaatgagattctaaatcttttattgttatttttctgacagaacaaatgtaaaattctgcaaagaaggcaagagacaatggtccaggagattccattctctacttgcttcatcatgatagtctctaaagagagggaaatgagctggcggcaggattggggtgaagagagcttgttctatttaaggttgggctaagaccatattctagccgtcactagaaaatgaaaagggaagtaacgtgagacaaatctctgtggcctatgtgatttgaacagtcgaagttgaggcttctatagagaaaccagggggcagaagcagggactgtgttctgaggaccgtcctaatagtcacatccttggaccttcttgcctggcaatcttcagtgtaatagtaatgacagaaagaattggaaagtagagtggcacagtgcccataggcatgtgcacactgtcccttcccaccaggaaaatagcccgttcctgtggtgaagggcctggagtttctacatgcaggtcttcattacccagctttctgccacaccttatgggtatggattacatagaattgccttaggctagaaatcttctgttacagcaaaaatgaatgttttgtgaatagaaaaagcattgggcttcacttattgtgctttatcataagcatcctctggccaggccttagcattggcatgaagtaagtttcaggaacagcgtgagtatggtgtcaccatacatctccttggtggccctggggaagccagtggatgtgagctcagttggaaaaacaaaccaggaggagaaacctgatctccagctgtttttagacagtcactttgattttgccattaagatgtgtaagtcttctctgttccaacctgttgtttaaattgattatacttttctccaaatatatttggattgtagtttgtcctgatttgagcctacacttagaagaaaattgtttttaggaaagattcacagaaatctgtccatttggagattgcttgagagaagacaggaaaaaggtttattttaagctgttaaaatttttggatgctcttcttgcattcaagaggatttttttttttttactttcaaatgtcattcttaccatagattaatttaaaagcctaatttctttaaggtaaaatattcagttcctatttagaactaacagatttggggcatttaaaaatagtgcccttgacttgttagtctctttaacttcagaaacattccaccagtgtgtgttgttccaagctttcacaagtgcttgaatttttatagcacctttttatttgtcatgtgtttagcaaaattattcttagtcatgatttaatgcccatatcctgtcagtatgatccttcccaatttacagatgagaaaactgagaaaattgacacccaggtagatggaagactcgcttgtggttaactcatttgggtaccgaggggtgtttatggatttgctctcattgtgagagcatttcttattggaattctctgttctgagcccaaagacggcattcctggctctgaacaggcatcttgaaaatgtgcaactactcatattggtgactgggttgtaaaacatgatggataaagcatcgccacaaaagaaaagtcagctctgcatatgaactgacatgggtgggtaagccaccatcttttttgcatatgaaggacacaggctgtgttttacagcaaagatgacaagtctgaccccctaaattctcagttggctgtttaacctcctgagcctcttcaaattcggcaaaagatcccagtggtattcaaaacaagaagaaatatagttgagatatgctttcttttgtgagatgatgaggttaatattgctgctaaaatgtatgttgctttgcagtgcgcctactaacacaatttccttttagcaatattcccccattaccccctagcttaccacctcttcaccattgctaaaaatctaatggtaagcaaattcacatggtgataatggaaggcattaagatgagttatggaatctgaagggtaaaaaacaccctaggtgtttgatagagcagttactcactaagcaagctgagtatgagctgagccaagtgctccctttaaatgcttaagcaggactaaaccaagtcagtaaagcagacgaagctctccatatgaaaaacctttcttgacagctatcaagctgtagcacatcacagtcatatacatgtgatagacgcgaccagaacttttacttgcatatttcttccattttgttttcccccaaataaggctcccattgaaagaagtgattttcctccctgtggccgtcctccctacttctgctgtagatccacctattctgatgtctttcttttgttggaagctgatatccatggtgacttaccttcccatgttttataccggcctcatcagactgtctcattttttgtgtctttgccaagatgcacttacgcatgaacagtttttatttatttttcattgaacctttacacatttccaaactgttgtgtgggtgggtttaactttagctccgtaggtagcatcattctgctggggctggacactcacagaggccaatgggctcttccttttccaactcttgccatccaccttccttggcctccccctcccaaccatttgcttcacccgcccaagtctgtgtgattaaaatttttagtacacttggctcattttgaacttttaagcaattttttagagaacaaaacagaagatttttatggcaaactccattaatgccacattaaggctgacattttaattaccccaaagtcaggaaatgcaaagttcaggttcccacagcaacagaaactgtccccttgagtgctggcatcacagcagattctttcattccctgattacacaacactgggtgtggggacattgtttttatccacgtatgtggaaaggagcacagcttttatcctttgatttttttcctgtaactacagttgaggatatgggtctttagcttccctcccaaaaccatctatacgtattatcctggaacggaagactattatagctctacatgtgcacacggacagaattaaagttgctgtgggaacattaactctgatttccggacttccgtgccagtcacatttaaaccataatgttgtaatttttggcatgtaataaatgtgcatttcatgtacacagacagaaagaagcataaaatgtattttaaagagcaattaattactaactttgtgattaaaaaacatttggtgcatgttccttcccatttagcatcagctgctggtcttagccaggcctaatagatgacatactgtgtctcatcctgtaactcagatgtacttactgtatgttcctgttcttccagataattaattcccttagtaaagctgtagggggaaaacaaaatggaaggaatatgcaagcatgtaaatagggtaagggatatttcgaaggaaattattcatttctgtgaataaaccttttagtccctgataacgagccagaaatctgctaagtgggtgtagacaaaggtttctggccatcttagagcatctggttcggggccattagaacaacttgaaagcagatttccccttgaattgcaggcatgcccactgggggagtgattttactctgtaaaaacttataggcttaaggcttaaaaagttattttactctataacaactttttagtctatgctgtattcaaactggaaagtaaaagttatagggaatcaggtaagatgagggctttgctaaagaacccctgacttaaagagtaattttttttcttcctttacatttaaatctggtttacccatttgtgttagagaaggcagtgtttcaaaataactgtttgaacgggtttgtgattgaaaggcgttagtagcaatactctatggtgccgtgtttaaaaatgcgaatgcttgagtatatatttgaaaccagatgaaataaaaaactttactgaaaggatgtatagcttaaactctaggtaaggctttaaggcagacacgctcaatgaagaacctcgtgctatccgttcattctgtctcctgttgtgtatttctttttgttcagtttggttgcatatgatatttaacctttaagaaaaatacttcagttttacagggctctgatttgcttttacttgggctgtctgtatgtgtgaatgtatgtctgtatgagtgaaaactgctcaagcaagtttgaaggtctctttggcaaatttgactgcatgttcagaaagtttccaatcggaaagctgattcagtgtaaaaccttccaaaaacttcctgaggcacctgttcacatgaaaagattggatttctgttggaggtgctcagaaggcagtgtttataactgaagatctctgtttggtgtgccaaaaaatgaaaaacattttggccccagaaaacctccataaatgttcaaaatgtataatcaaacaaaagcttcatttggattcaaatgcatgtatctcagcagatgtgtctaaactaactggaatcccacaggagcagctgaactggattttggtatgtcttgataactgaaagagttattcttagactttggaaggacaaaaatggtccatctgtgaagaaccgtaatagagacatggcaaaaaacagcatcctctgaaagagtttatttatggaatttaggacaagttggacaatcctgaaaacattttagggtcacactaatttgcagagaaaatatagccaaaatggaatggaataacaaccacagacagttactatccaatggcttgttattaattttctaataaattccgtatcagttaagcagtaatagagtgtctttggtacaactaagtgctctcgttgcccccagtgttctgcattctgctttattctatgttctgtaaggaattatatatttatcttttcatttaaactgtttttctgtcatttcattgccaagtaagcccctcatctgttaaatgtggatttcctgtcattaaagatagtctttcccgttttaaaaagtcacctttctgcctcttagttaattgatatataatctctttggaattttttcgttaccttttataccctttatttagagattttagtgcttagtccagcacttatacattggaaggccagttcgttttttttatttgctctaatttcctagagtttccactttgtgcatttggggacacacttattttaaaaaagcacaggtcttgaaactttgtatcttaatctacctctattttttaaattggccctctttttataaaacttattatttccctacaacaccaatttaactgggtttcttccatagtcacttaatgcagtaatttctggtagtcgttcttattcattcattcatttagtcattaattcagtcattgatcaaatgttatcagatccctcattctgcaccaagtcctcagctaagattagggacgaagataggaataagaccccatccccacactttggaacataacggggtaaatataaatgcagaattaaagtgttccagtatgcacaaaatgctacagagcccccgaggaaagagcctcttgaagtggaaagagctccacaccaaaaatgaaattaaactggatcataaaggagtgggcatttgtaaagtagaaggcagaagtaatggcattccaggcagaaggaatagaaagaagcaaaaccatagaggcacaaacagagcgcagagttttcagaaaacagaacagttcagttatgacactgaggccttcttatactttgcctcattttaatcatgggaagatttgtatttgggtaacattgtctattgttataattcagctgagctgaatcctatatccatttcagagacatttgctttccaaatatataataaagcaagacatctacttattttctaataggcaaaagaacccttccttccacacagccagtcaaagtaagaaagtattctgagggggcaaggcgcagtggctcacgcctgtaatccccgcactttgggagaccaaggcggccagatcatgaggtcaagagatcgagaccatcctggccaaatggtgaaaccctgtctctactaaaaatagaaaaattagctgggcatggtggcacgtgcctctagtcccagctacttgggaggctgaggtaggagaatcgcttgaacccaggaggcggaggttgcagtgagccgagattgcaccactgcactctagcctagtgacagagcaagactgcatctcaggaaaaaaaaagaaagtattctgaaggacctagtgatgattttgatcagtaaatcacaaaataaattttctttttatttttcttttttgtttaaacagggtctggctctgttgcccaggctggagtacagcagtgcaatctcagctcactgccacctctgcctcctgggctcaagcaatcctcccacccagcctcctgagtagctgggaacatagacttgtgccaccacagccagctagttttttggggggttttttgtttgtttgtattttagaggtgagatttgatcatgttgcccaggctggtctcgaatcctgagctcaagcaatccgtctgcctcggcctcccaaagtgctgggattacaggcatgagccaccacacctggctcagaataactaattgttgagaaaagttcattcatggagccagagtcacctacaggtgtcatgctggaactttgtcatggatttgtggcccttcccgactctaacagtctgtcctcttataaaatcctcccaggtcccttggcaagtctggtctcaatgcccattggctcaagttacactgtgtcatattgctctcccaaacagtgcatagatatgattatccacatgtaattgttagggcccaatgctgattttcacggttctgttcttcatcttgccatctcatcccatgcaggaatacatctttaattcttatctacagctgctagtgacagtttcatgtgtgcttcctctgttcatggcagatttcattatataaaattagtgcttctccatatctgtcaagacttctcacatccttacttaaaataaaagaggccacatgcactactgcccttagagttggatcatttaggattgattgagagcaagcatgaggattctttaaggacttcttgctttaaggaaatttcaagtcggatctttccaccagtcacctcacactaggtaccataatcacataccttattacttcatcagcagaatccctttttttttttttgctttcttttttgcttttcttctgcctctgaatcatttgttctctctgaggaatgtgtgccagttctaactttttatcagcagtgcaagattaaaggttacctggtctatacccattattgtacacatgagaaaactgaggcccaaataacacaagtgttataacgaaagtttcccagcataatgaatgacagagtcagaaacagaaccctgccctttctcccaccatttatgctgcttgttactaagtctgcttctggacaaacttaatgttctctgaacagaaaggagtcaggactattcatccatcaatatagtggatgctttcaatgtggaggaccacaggctaagtattgtgcaggacgcagttttataaactggagccctaggctcagagacttagagtcttgtagagaagatcaaataacattcacaaacaacttccatgcagcgtggttaaagatatgtccccatacacagagacccaccggagcattgattcactcactcagcaagtatgtatagaatatatcttttgtgcctgtcactacagtgagttccatgaggacacaaaggtggagaaaaacagaccccaccaccaagaatcttaaaacaatatgtatcctcacatcaccagtatctgagaatttagaaagtttgtaaagtatattttaatccagttaacagtaatatctaggtaggtttattagacatggctccatttgagctcttttgaaagactggaaatgaggcatcaggactaggtatgaggggtttgcacctctgttgcagagctgtggaagggtgttaagtagggcctaccatgagcaagattttgagaagatctaatttggcagcctggatgtgagaaggagcaactggaggaaggagagggtccagacagcactgtcagtatttcacactattggtgacctgaagggggcggtaataggaggaatggggaggatccaggtgcaacagattttgtggatgagggtagacagctctgggagctgagtgttagttacaacaaaggcagttatcaaagataactccaaggtatcaagtaaagatgaaaagcatttaaaggaatcaaattgaattccattttatatagtgccgagtatgagctaccacaggtgttcccagtggagacaactaacactgagttacaaacagggtcctggggcacagcaggaatgcgtgagattaggactagcaaacactttggccaagagcactataagccataaatatgggagtaaacttcaaagaagtctttgttgagagaaaaaaggaaagcaaaaccttgggaaatatttacatgagtgataagaaagagaatgaagaatgaataaatagaggaaaagaaaagagagttctaagggataggagaaaaaccaggatagtgcagagagaccatcagggagaggaaggatcagcagtcagtatcaggtgccacagacaccaacgagggagagacctaggaaaagattaccttaggttttgggattactagcctcctgattgttgtcaagaaaacagaatcagatgtgtcacaaaaaagaccataaagaggggttcaggagcaaacataggataaatgggaaagcaactattacaaagtacaagtttaatgttttaaaaagaaataatgaatgggtaactcaaaagtggagtaatgaatatttttatgatacaagagttcctagcccattatagactgagaaaaaccagtgttaagggagactctgcaattaaataggcaaagtgagaaggaattagatcttccatttcacagggcaattggaatggtaaatatatgcgaaaggaatttgaaggcactacccaagcccagtgaggcagtaattatattatactggttctttctctacttcttctcaacattgctttctattattttttatgagaaataatgttttacaagtattattacttcacaaatattaactcagttccttaccctcagtaacctctgaacactaagcagaggataggtgtcatacactttgaacatttaaatcatcttaacaatttttaaaacaatttttaaaaacaattgtttttgaaatgacaaagcataattctttaaaagccatgttctgtgtacttctttcatgatatgcccaattcaggtagctctgtaattactaataacaaacctatgtgttgttctcaaggccaccttcattgtcatgggacatcctcaaattcattatttgtagggagggtttcaatttgtttacttaaagtatgctgctttctgtgatggtccaagacattccaaaggccaatcccacctgtacacaaaagtatctgatatacttctactgtaggatggtgatctggaaccaactgaatcaaacgatactttgttctactattaaattacctgtaaaactaaataaggagattattttgtcactactgaaaattatataaacaaccacatggaacaatgttgaacatgagtctttataatttcacaaggccaaatgaatttatagttgatgtcaaaattgaccttgaggagttttttcctttcctctccaattctaaaaatgagtttcctcctacttatttatcctcactagttttagcttggttatgttatcagttttataccaagatattagaccaaagagtacagaatttttaaaaaagcttggtgtggcatgtagaatactacaaagaatttcaaaaagcagtaactgaattaactttgtccttcaattttttactgtaatcacgttcttccctatataatcactgattatctctttgcctcatatcttaaccaggtatttagatgtaaaggagacaatgaaagaaaggtgcatataagtttgaactacaaaagataactctgtgtctaatggaaaagacacatgcaaattctaaactaaaacttttagaagttaaccccagggtaaaggatacatgtcattttctcagggaaatactgtaggtctttataggtacacctgactggattttttccaattttcataaatctagcccattccattttcttcctgacctaaaggtcccagatgggtgactagatcctgggattcctgaagtggcctaagtaatcctgggttgacatgctaacaggcactgcaaagcaggcctggtttcactgggcagtgatacaggcaaagcgtgcccccacttccagccctgctccagagcaggagttcttgacctggaggccttggactctactggtaccattactgggcctttcttttagaggttcatattctttcctgcgtgttgttctgggacacaggtttaaagattttgttacattagggtcagagaactaacagaaggaaaaagccacttccccaggacatatcctaatcagaatctgcaccctcaaacctggcacccaagagtgaacttagaagcaatgaggagaggtccctgtgaacatcccaatgcagaatggctcctgatgtcctctcgggtccctccgatatgccttcagggtgggggcaggtatgataacagactgctaaagctatttcttgaacatgttgctaatggactaagactggggctatgtgttgttttccaatattcagaaaatattttctcacccccatggtctacttatttgctctttttaacatgaacttcagcctatgaatgcattttatgtgcctttaattaacctccctatgtttccatttcctcatgtgcataattgcataatgagaataaaaatagtatgcatctcatagggttattagaaggattcgatggaacactacatgtaaagcccttaaagcagcaccagaaaaacagccagcgctccgtgaatttgagtgtcggctacagttttaagtgcttgaaaattattaatatgaactaaaattgatgcagcctaagtgaaagttgttgcaggtccccatcctttccccctgagaacgactgaggctgaaaagccctagatctatgggaggagattgtgtgtaagacagttacatccttcacttcgaggaaaagccagtgcccttcttcttgtcccttcttggattcaggcctgaatagactgggaagtttctccattatctctttgccttcttttattcccccatttgtatgttttttttttcctaaaaatgaaagaggactaatatgcataatcttattacaaaacaccccatttacagataaggaaactggggctgaaacaagtttcaaatctctctgaatgttgtcttcttggtatagggaagggttagagtgttattaatattatagcattacattctagtgttaacctgttaagttcctttttgtcttcaagtgcattctagtcaataagagattttcacgctgggcatggtggctcacgcctgtaatcccaacactttgggaggccagtgtggatttatcacttgagcccaggagtttgagaccagcctcagcaacatagtgaaaccccatctctacaaaacagttagcggggcatagtggtgtgcacttgtagtccagctacttgggaatttgaggtgggaggatcacctgagcccaggaagttaaggcttcagtgagccatgatcatcccactgcattccaccctgggtgacagagtgagatcctgtctctaaaaaataaaaaaagaagagagattttcaaattatagggaatggacttgtgtgctctcttacctcagaatacattgtaggagctgtacattttcctgtgtgcacccatctacaatctgtccattcaccttaggtgccctttcaccatagctccttccagccgggatacccgaagagggcaaaacatcagatccttagaatgtgcaaacttctgtgctaccatatcagagagccctttgcaaagacaaatacttacaagtaaagaaatgcatcttttatttttttgaaagtccgtcggcttgatggcatgagagttgtctgaaataattcaaaacagaggtaaacttagaagagtaagtgagtttcacttccgaggaggattgcttgtaatcaccctgcttacttaccttcttctattctgaagcagtctgcagtagttgggaaaagtgtaatcttaagaaattcagtaacagtcactggctcattgtacctggtaagttttccccgtgccgtggtgcccacggtttttggtaatgcatggagataatttcggacgtctgcttctcttaactcctgagcacttttgcttctcactgtagaattccagagacacatgggtatggaacttgatctaaaagcctcctagtaatagttgcagattagattgaaagccaaactagactgtacacaagtctgtataaatcccaaaatagagctttaaaataataacttactgagtcatgatttctgcatctcatatgcagtattccttaaatcacatgttgatggctaatcaacaaaatccaaagacgcaaattagatggtacaatatttacagagaaaatatatgtgtagtttgaaaagcaaggattctcagggttacagtcccacccccattccccccagaaatgatagcagttgcaatctgaactctccacattgtaaccaagaaaggaatgaatataacaatggaaagagagagatttaagatagaacttcttagttaaaggagtctggaccttcaagaaatatgtttaagaaagattcagaagaaatactaggtaagatgaattattcctttttctcaagtaaaattctagcagcgtacttgttaaatgtttattttggccaggtgacagaattcaggagggcggaatcttgtttaccttgtccactgctgaatccctagcacccagcaaagtgcttacacaaattaggagtaggtgctcagcaaatgtttgttgaatgaataaatgaatgttgtggggagaatgaagctaaaataatgatgtagtgcatttgtaagcattatgcccatttgtgaaaatataggtactaattttttacccgattatttttttcattcagcagacctacaaaacaaagtgtatcacaaataccctctgcttttcatgctggggaaacagaaaagctttcttttgaatgtaagctgctacatgttttaattctaatagcaatatggcaggtcaactttgtagtataatctggtgcctgtttttgatagataccatggaaatagatacttattttcaagatgctcaaacagatgattaggcaaaagctctagcaaaccttgaaacaacaaaaaggaaaggttttcccactcccacctcccgttactgtaacatcctgcacagttttctgcaaccccacatcctcctccttgtttcatctttttcctgggtctaatctttgtctagggaatacagcatgtgactgtcagtctagcaaggagatagttcttgagaaatccaccccctacacactgtgttcccaagctcctcttacaggaatggcatgatttgatcagcagcaggcagagctggcccagggaaacaagagcttggcatagaaatcttagtgccctcctgctggaagggccctcaagagagatgcttcatgcccaccctccctcaactggctggacagtagatggatgtgtaggaaaacaaattcctggctgaatgaatagaggattaaatgaatgagagatgagttcactcctccagaagtccccgccatcccacttgaatagaaaggctaactttgaagccactctgttctccatggcactattttatgtatactcagctttggaatatggttgccatctgctgccagtgcttaggactaaggaagtattggggtgggtaggaggaggctgggagggaagaaaagagacacttaaaatgagctaatgatctcctttgtgttagagcctaggtttcagaacatcaatcctgtacttcaagaacaaaacaccagtgtgtcttagaccacaccaggcgccggcacatcagataaagcctgtgctgtgtggtgtttagccaccgagcctagagaagttctaaaagtgaaattacaggtgcaaactgaggaaactaaaaggagaaaaggccaagggtaaaatacaatcaggagggctctgccgatatgtatctttggggctacagtagttgaaaaatgaatctactaattaatcagttggataatactataaaagcaaggaatttaaggatctttagaagaaatgagacacttttccatacactctgagcatattgtgagcctttagtataatctcagggtgaaagtgacctggctattgtgtattgctgtagacgtaactgttgattaagtgttagagattgctgtactagaggcatgcatggtggtcctttaaaaacagaaaaggctgttaagctcagctagtaagacaatcgaacatatctgaacggcagagaatagctcatagagcttcctagcttccctgatgttgtttgcataaattgttgggggatgtttgtttgtttgtttgagacagagtctcactctgttgcctaggctggagtgcagtggcatgatctcagctcactgcaacctccgcctccagggttcaaattattctcctgccttagcctcctgagtagctcgaattataggcatgcgccaccatgcccagctaattttgtatttttagaagagacgaggtttcaccatgttggctaggctggtctcaaactcctaaactcaagtgatccacctacctcagcctcccaaagtgctgggattgcaggtgtgagccaacatgcctggtcaaattgttggttttgacacaaaatcatattgataatttatgtactgaaataacatgccagagaatagtaattaagctggggatgtatgctagtgaaaaaaaaaaatattacagtgaagtttattttgggaaaggattagctaattggctaggcatgacatttgaaggccatgtactgttatgtattcaatagtaggcctgtatcttgaattggaggaaggctgaaatttctttttgcaagggaagaacctcatcagcgatgtatataagtataaatttagagacaatgacaatcctagaaatgcaaaataccactttagggagcagtaagtgattgctgagcagtgtgtcagactcagtgtctgagagcagcaaatcagaacatatttgttggctgtgtgagctctggccttgactactgtcttccagcaggaacaagtcatatacaactgtgactcagccacaattagaatactagtaatgccctaaatctatctcatgtacagtttctcttcctaggaaccttgtgtgcctcatattctatttgtccctacaacatccctgtgaagcatacacacctttgttttacaggtgggataacaggtccataaaggaatagtttaattctttgtcttcaaatgtgaaatgattgataatcagtatactgacccagctcattgtaatgtttttcacattatttcaggtttcctaggcaaaggacatattttatcttctcattattatttttaattagttttcagaaaaggtgagataaaaacagaatctaacaaatatcccatagagatatttggtgttctcttttctttcaagaataaattaagaccttctctgctcctctctgctggctctctcggcagatagtcaaaatcccatgccaattttcaaatgaataagggatcattctaatagctgatcacagtcccctctgttgaggaaacagcctttaaaattcatgtctggaccctgaataagttactcttggttataaacttttaacagtttgacctgaaggtttttaaactgtactaatatataacctgcttgtgagttcagcaataaatttatccccagtatgtgaagggccaaagagaaaactagtgtcttttattctctccagtgaccttcactaaatattgcatatttactttgtaaatgaggacacccagtggccaccaagagaaaatattctaaacaatccttgacactactgttaatgtacatataaataccctgttatcaatgctgattgatagatatttctgtaacatctgttaccaagcaggttagcttccctaacataggcaaaagtgatcggagtttggcctgatcatttttctatcacatcatagattggtcatctcttcttattttttattacaaagtatggcttagctttgggttccactgaatcctctgttgacagggggacccagtgagctgtctctctggggaaatggaatcagggagacagagacagcatggcatgtatcagaaatcataaatgaatgagcagagtttgtgggcaactcagtgaacacataaaacaattgcttggactttaaattctattgaaaatagaactgtgggtaggtagggaaataaaggacaagaagaagagcattacacagaacttcaggggcaaaaaagccctgtcaggaccatatcacatagacatatctcagagtaaatgtgcgccctgaggttcccacttgtttgtgaagtgtagcgaagagctgaccaaacaagcactcacatagaacccacacattataaagaaacatgctgggcacaatgagggatccagttacatatttgtagttgtcattgtagttgtggttataacaagacaagatactagcctttgggaggctttgagtcttagagagataagacagacacaaatgaaaaaagaaacaataatatattggtaagaactaacttaggtgctacatgtataggaagttcaggtgaacttccccaacactcctcaacattcaggtacaaaaaaattcccgtatttttctaaagaaaattaaacctgaggcccctgtcaccaaattcgcaagaaatacagacaagttttggggctcccttctcatccctagattggtacaagactcattaaatctaagtccttagtccatgatggtctccaacattgacattgcttgaccaccccacaaagatgccattgagcctcgtccttctgactgccagcactactgcactagctgggtttacagatgccctccacagtggtccttgctgttgaccattggcccagcccccagatgatcactgttcctctcaaagtggtgcctttttatgtccagcctccagaagtgtgccaagcaattaccccaactggagctgtatgcaagtagagaccttgctaccttctgcatttgagggaaagtggattgtttttctctccagtaatgctatccaattctctaactccaaagcatcaatcagcctcactctccttacccattctgggttaataattcattttagagaacagacattaggaaagaaaactctttgttttatggtttattctttagggcttaatgggctctgaaaccacaactccctgaggcaaaggagcctataaagtatacaaaaacctggccattcattcctacaggtggaggaaaggggagataccttctcattaagaaagttttctaattcagtgagaacaagccaaaaatgaatgtcttagtttattacctcaccaaccagtggaaaccaagaaaagtgaactctagtaatcacagaaggcttcacagaaaaggaaaaagtttgaataaggttcatggggatgataagacttggtgaggagagaaaccacaataacttcagaactgcggaaaattcagcagaagagaagtaaaaatgaatgtaatccacacacaggaaagcaaaatggccaaccttttggattagcacagagattttattttagagaaaatcaaatccaaccaaatcagtgaagtgaaatcagataatttgaatgttagctatagctataggagacttctatagctcaatgtcttttttgacaatatgtaaataatataataaatattatacaaaagactatataaagaatatcataaagataaaatgcctacttgtgattaaaataattataaagtatgccttctactttacttatttaccagaacctcccaaggttttgagttctatctgacagcacttattcttcatctcagtatgagccaaaaaggaacttaggtcctattcttttttttaatgatttcccgtgcctggttctataccctaggtgcgcagatgaatttcagctactctcttaacctagcccacacaaatcatctcagtgcttccattttaaccagtcatccaacaaaacagatttacttttttccttggcttttccctgttgctttgggatagaaggtctttactcctcagtgaacttatctatcatggctcaagtccatagagaaattggccgggcacagtggctcacgcctgtaatcccagcactttgggaggccaaggtgggcagatcacaaggtaaggagttcgagaccagcctgaccaacttagtgaaaaccgtctctactaaaaataccaaaaaaaaaaaaaaattagccgagtttggtagcacgcttgtaatcccagctactcaggaggctgaggcaggagaatcacttgaacccaggaggcagaggttgcagtgagctggagatcgcgccactgcactccagcctaggggacagaacaagactccgtctcaaaaaaaaaaaaaaaaagaaaatcttgcattcccctcctaccaacaaacagagatactcttgaaaaacagcggtctcattggaagcaacttttttttatttgttagaaagacccaagggaagagaacatttgagcatgaatttgaagacctgcttcaaaagcagtttcagaacagcacagcaacagaggactaaaggaagttctatgaattgggaactcaatgatattttttgccagaaagctttttttttttttaatgacactattgagttctgttttctcactcgtttaagtccagagaaaagttttcccaaagtcaaaaaatcagtttcttacctaactataattcatcagtgtgtgatgatattctttaaagaaatgccatacctgagagttatactgaatctttgaactcactgaatttataaatctgttttttctataaaataagtatatgattatgtagagaccacaagaacagattatcaagtaagaagatgctggttttcatatactcaatttttaaatttgtgattgcttcttaagcaaaacaaaagacctaacttattaactgtacaattgaatatacagatccttctttaaggtctattcaaagccaagttcaaacagcacaaatttgtgaatttaagtagatcctttggttcatttttgtataccacccacggatgtagcatctctgtatttttgttccccagatttagtgaacaaaggaaaaggttacaatagggcagtagctaaatttgtaaggaaagcgctttagagagagaaaaaatgaaactcctaaaaggtgtctcaaaaggtttacaatataagaggatttaaaggcatcaacctcagatttcattgacttttttccttagtcccagcaagtcttctccccctcatttcatttcaactttggaatgacggcgtaagtgtctttcagaatgttgtctggaattatctatccaattctttattcacagagtaaaacttaattttcacaaactgtactgtaaagtaaatttcaacagtttacctcattggaatcagatgctcaaagtataaaaaattcataaagcatatagtgtgataatactcaagactgaagttttaacttatggttggaattggtttcataaagtggatgctcaattacttgttgattgattgattatgccctcacctcataagtaagggatttgaggtagcttaaattaatattcaattgttaataaatatgtaggaaatgtatttctatataactacaaaaaaaagaaatcagagtagaggtaaaataaagaatggataatataatgaggctggtgaaaattttacatagaaaagcataccatgaggtcctacatagttgctaaaagggggcctaaatttttattctgagctccctagtgaacagagccaagagggaaacatgatcagttatgatattcacaggctccacaaagaaaagcaaaacacagcttttcctgagcactgaggtctgggagaagttgattgattaatatatgtttccaatatcaaagatccttatggataaatttcttctattgatttagatttaagatcctttgtatccttatggttccatttatactggggtattctcagtaaatgtttcactaatgaattggtgaaaattcaagtgacccccaaagcagcttcattcataagtcagttgtatttacagttttacaatatggataggcatgccctcatcctttcttagagagaacagcagacttaacataaaatcaggcaagccaaaggcctgggctaaccaagggagactgtgagacctctaaggccaagtaaaaagacttttctggaattactttctcctttggacctgtaaaatcccactagtactgtaaatctattctcagccttagataaagtataaagctcttattttttggtggagtgaagagaggaaaaagaagtcaggaatggaagataagtcaagatttggggatgggcctgaaaatcacagagcaaatgtttttctagttctcaattttgcctctttgttccccatacttcaaacttagtaaaacttcgtggtatgacagcaaaaaggaagaaagggaaggaggaaaatagaaagaaaggcagtctccccattacaagtgctatagatcttgcaagtaaactatttttttggctgattagatgtgtatattgagtttatatttattttttattcaaattataccacaatatctaatttttaacagtcaaaagatgttaaagggtgttttctaattcttctgtggatttgtcttaactgtcaaaagggacttactctgagtaaaacaaagtttgctaaataatagttagcttcaacagttgtaaactatatgtctgtcataatccagatttctgctaatattagtagttacctacatttctctcttccctttcaatctttttaaaaaatatttctcttctgaaaagtaacttttctcattttggccaagattgtttgctttctcatacaaaatagtatcagctcaacttaagtaaatggaaaatatcagttcaacagaccttatgcatcagagtaatgcaatcacaaagtttgcatcagttttagaagctttgattatggaaagtagttacaagtattttaaagagggatgcctgaatctcaatccacagctcttaatttggggaaaacacagacccctttgagattttgatgaaagccactgaccttattcctataaaagtataaacatgtccatttataaaaactatacataccccccaaaacccaaacataaaaccaaggacctttaaatacttttaagtattctctagaaatgttctatgaatgaataaaaattcaggtaatattaaaggcatacccaattacagtattgggatcataaatagaatggtgttgtaaatactgtaaacaagttagtaatttttaatctttgtctagataaaataataagtagtgactaaaaaagcacatccagctagtccccaactttcataggtagccattcctgcaaacatgtttgaaagtcaaatttctgcaagttcgaagtcaaatttctgcaaatttcaacaattgatatatgttttatgtgaagaattctgttaccaatggctaaaaaaacgtgctgaaatccttgatggttcctccacactgggcttagacaatctggaagatagaggagaacctttattgggagatggcccaaaacaccccccttttcacccaagaatgggtaagtaaaactgtacagctcgccctcccataggctgatgaccctccctagtctcactacagaggtaatagcagctgggatatgctaggtatatagagccaagataggagaaagagatcttgtctgcttgctgccttccacttgcatgtgtgatttctccagtgctcccagccacctcccaagactgtgatgatactaatgagatagaaagagagagtggggtggtgcagagtcatttgctgtggatggaacctgttagcaagaaactactatacctcctatagtgcagggattcagcaggactcccttggcatatatgaggaggtaaagtacatgtaactgaagtcttaccccaggcagggggtttggagaataagggggctcagtcaccaaaatacatcccccctttctccagagatgactggctctttcctagtgtgactaacttggcaagctgcaccctgtttcatgtgcaagacccactaacctcatctggtgccccaaattgaaagctcaagggctttctggccctgccacttgacttaggcttattaactggaccgaaatttatattggttttcatttgagagctgatgtttccttccaagtccagagacttcaaatccccatccccctctgtagcatcttacccttgcactagtctcattttatatatccttttgctctcctgattgagaaagaactggatttcacacctaattaaaagagattgtattgcctgctgtttcctttcttgctcattttctcttgtgagcaggcagctttttattctcatgctaagtcctatccctggacccctgcagcttaagggacaggcaggagcaacgttcctgcaaaacagagagtcaggccctctatccccaattccccacaggcagattttcccttcggtactcacccctgctttagccccgtctgtgttgtgctctcgcagaacagtctcttagaatacatgatgactttcattactgcaattccttccatgttttgagggaatgccatcacaagctgactctgtatttttactctagtaaaaaggaggtaagttattattttaaaacacagagaactatttttatcactatttcattttgccatcagttttgtgttcataacactgtgcattttttattttgggtggggaagaatccccaaatacacatgatcacataatctatgtaaagttttgtggttttgtacagttgatagggttggggtttgggtgtgtgtgtgtgtgttttttttttcttgaatagcccaaatgcctattcagtgccaatctaagaaagaatagagttagcattttcacaccattccttcctatacactccctgaataaccatctaatcaagatttgttttcaatgggggacaaatcttctacagtagagtatttcagatttattccattggaatctatacattaatgcccattggatgaaaaggacatgctcacaaaagcctggactttgccttgctgtggcagaaactttttcccactgtattagtgttaaaaataaaagaaagcctgggaaaggaattgcctcagcattgtgtgctggaggaatgaggcatgcttgaatggggaggcagggtcccccttcgcatctgtactcatatcagcaaaaacgattcagcttttcatggctgttcactgcagtgtggggccagtgtactcagggagatatttaagaattgtgtgtataaaattcaaccaggcatgtcagatcaggttgtgtacgtgtgcaggtttaggtttgtctctgtggtttttaatgaagttggtggcaatattatcgcaagagtcttaactcagactattcagtagataacttgattgtttagatgaacaaaatttgcaatccaatctggtcaaacagtttggatttttctcatggaattgtgtgtgtgtgtgtgattatctgtgttcatttcttatctctaaagcaaccttcatcattactttcagtgtctttcttttttctctgctgagaattaagataactctcgatctttgggcacttcaagttccattcctcagtgatccactgttatgcagtggaaaaagctttaagaggcatagtttctaatcccaacactgccatgtgctactgtgcaaaactttgggcaagtcatttagacattttgagagcctcgactttctcttatatgaaatagcaataataagacttgtcctgaagggctgggcacagtggctcatgcctgtaatcccagcactttgggaggccgaggcgggcagatcacctgaggtcaggagtttgagaccagcctggccaacatggtgaaaactcatctactaaaaatacaaaaattagccaggtgtggtggtgcatgcctgtaatcccagctactcgagaggctgaggcacaagaatcgcttaaacccaggagttgaaggttgcagtgagctgagattgtgccactgcactccagcctgggcaacagagcaagactctgtcaaaaaaaaaaaaaacaaacaaaacaaaacaaaaaaaaacctgttcagaacacacataggattgttgtaaggaataaatgagatgttacatgtaaaaaagttgtatacacagtcaaacactacatggatactaattattgtgataattgtgatagggctacttcccagaattatctgaaagaaaactgtcatatatgacatctctagtgttattgttgtaactaatgttatgagcaaatgtatgtttaaagagtgttttcacttgtgtagaaaaaaatgttgtaataaatccatcctacacagagatgatcacagacacaaccagttttactgcttattgttttacttaaatgaaagagaccttggttatagtaaaattgtatatagaaaatcctaaaccatagtgccagttagttgtcttacttcttgcactgtgacatctaaaaaaataagtcctttaagttacacaactgaggctatgtcaaagcatcacagcctaaaaacatgaaagccacactaaatcacggataggtatagaagtagctggaggtagtagtggacaaagcctttcacacagctttacaacagagccgtggatccctaagggccagacctcagtaaagggcaaactatgcaatataatgaagcagttaagagggtgaactctagagccagactgcctgggtttaaatgccagtctaccagcaattgcctgtgtgtacttgagcaagtttcttagtttctctggcctcagtttcctcatctgtaaaatgggaataatatcatctacttcccatggttgctgtaagattaaatgaaatcatatacagaaagcagttagaactgtaacccctaaaaaatgttatcttgtgattactatcatggtatgtatgtatggcgaactcagcaagaacttgaaatttggtctgctgctgattgagctcctgaacagcccttcctgggttatttgtgccttcttttggggccatattttgtgttcacatggttacaggggatttaccttaattctttaatctggcaaagagaacttgtcttatataagtaaaaacgatggaatctgtagcctaatacaatattttaggcacataacagacctgatagagtcagaacgagaaagaatgctcttatacaaattagtgcaaattgtattattgaacatttattaagttaagctcataccatgtgagggtgattgagtgaagcaaggtagaaacgctcattgaactcagagtttcctgaacaagtcttctatcgcaaggtagagcggaaagagtttgaggaggtaggccttcttcctatctgcaggctgttacctctcaggtggcttctcacaagacagagagatttgggtccaggccaacaatcagtgcttgggccatttggttttgaaagcccacttatttcactttcccaagctgattgttcagttgtaaaggcaagaatggggaatctgattgaagaattatttggagggggattctctagagccatctgagagatgagctagaaaaatagaaaagccctaagatctactgctgtagccacctgttttctttctcattctgaatccaaatcttatcaatagtatcccttgccataacagcctacgttatagggtggcgctgggtcaggctatccgcagcctccacatagctgttgccttcctcctgggagctgtttaatacttccctgtggcaagtacataaagcaccctattacccaaggagatcatatatcccacttctggcttactcctgctatcctggcctaattattaacaatgctctctttcactcttgaaagtgccctgtttgcataataaatatgatcaccaatgtactgtagtctcctgggtcagaactgccatctctgacctttttaacattcctccttcattaagcctcagaaaattcagaaaaccttccatatcacatgcaaccaccctagaaagtgctcaaacaggttgtcagagatgacaagaagaatgagtagatacagaaagcagccatggagtgcccctttagctagcagattgctttctgtagcccatccatcatccggaaagcatgatcatgactgtttggtagatatcttagtctgggttgaattttccaataatttttgcatacatggtgtgggttttgataatatgccatatgacttaataggaagggggtttatttgttaactatgaatatggtcactgtgtatgaataaaataagggactttgataagttgggggaaatgtaaactttcccaaagaatctgggcttaggcctgtctaaagtgaaggcaaagtaaataaatacataaataaaaataaagtggaggtttagtgttccataagaacaagtcttccatttgcctttcagttctttgctgaagctgtaggaatagcaggcaaacaaatcatctggttattaggccactctacctcagccgaagctctggggagttaatatggatacccaaaatggctgcggcactaaaggccggaattggagcaaaattcaaggtccttttccctcaggtcatcgtacctacagcttgtatgccgcagcctgtccatctccccacttgcgtatgtaagggcagtgcttctaggagccatgagcattactcacctgaaacctaggtgttaggaatgcaaccagctagatctgacccatgccctgttttgtgtctgcgttgacatgctgcaggtgacatcagttgcaaggggatgaccgagcgcattcacagcatcaaccttcacaacttcagcaattccgtgctcgagaccctcaacgagcagcgcaaccgtggccacttctgtgacgtaacggtgcgcatccacgggagcatgctgcgcgcacaccgctgcgtgctggcagccggcagccccttcttccaggacaaactgctgcttggctacagcgacatcgagatcccgtcggtggtgtcagtgcagtcagtgcaaaagctcattgacttcatgtacagcggcgtgctacgggtctcgcagtcggaagctctgcagatcctcacggccgccagcatcctgcagatcaaaacagtcatcgacgagtgcacgcgcatcgtgtcacagaacgtgggcgatgtgttcccggggatccaggactcgggccaggacacgccgcggggcactcccgagtcaggcacgtcaggccagagcagcgacacggagtcgggctacctgcagagccacccacagcacagcgtggacaggatctactcggcactctacgcgtgctccatgcagaatggcagcggcgagcgctctttttacagcggcgcagtggtcagccaccacgagactgcgctcggcctgccccgcgaccaccacatggaagaccccagctggatcacacgcatccatgagcgctcgcagcagatggagcgctacctgtccaccacccccgagaccacgcactgccgcaagcagccccggcctgtgcgcatccagaccctagtgggcaacatccacatcaagcaggagatggaggacgattacgactactacgggcagcaaagggtgcagatcctggaacgcaacgaatccgaggagtgcacggaagacacagaccaggccgagggcaccgagagtgagcccaaaggtgaaagcttcgactcgggcgtcagctcctccataggcaccgagcctgactcggtggagcagcagtttgggcctggggcggcgcgggacagccaggctgaacccacccaacccgagcaggctgcagaagcccccgctgagggtggtccgcagacaaaccagctagaaacaggtgcttcctctccggagagaagcaatgaagtggagatggacagcactgttatcactgtcagcaacagctccgacaagagcgtcctacaacagccttcggtcaacacgtccatcgggcagccattgccaagtacccagctctacttacgccagacagaaaccctcaccagcaacctgaggatgcctctgaccttgaccagcaacacgcaggtcattggcacagctggcaacacctacctgccagccctcttcactacccagcccgcgggcagtggccccaagcctttcctcttcagcctgccacagcccctggcaggccagcagacccagtttgtgacagtgtcccagcccggtctgtcgacctttactgcacagctgccagcgccacagcccctggcctcatccgcaggccacagcacagccagtgggcaaggcgaaaaaaagccttatgagtgcactctctgcaacaagactttcaccgccaaacagaactacgtcaagcacatgttcgtacacacaggtgagtgtcaccccacctggaggcctggcagcaggggctgagggggctgtgggaaggcaaggtaagagagcaggtagaagggaaggtttgggatcatctttcagattttaaacagaccccaccacaagcctcttctagaaaccccaactgtgttcctcccatcataagaacaaagcaccctgccaccaagagacaccgtcacaggaaccctttatggagaagggatgtcctagggatgtccagactgcagaagagaagactcaggtcattatataagccatattcaagtatttgtgtttcagaggcagcatactgtagtcaggaagagcttgagctcttacacccagccagatggcctgggtgtaaattcaggcttagctactactaaaccttgtcgccttggaaaaattacttaacttgtctatacttcagtttccttgtgtataaaatgagaataatcgtgatacgccttccttatagtgctgttttgagaataaattaatacatgtgaagtctttagagtacttccaagcatataataagtgctctataagtggtagctattattaagatggttaagaggaggagacattcagtttgtatagtttggctccaaaaggtggaactagaccaatgattggatgctatcaggagatcctttccacaaaataaaagaaaaattttgttaacaatcagatctgctctaatatcagatagactgcctttaaatggagtgagtttctgtaattagacgcattcaaggagagaatggatgaacatttttagggattttgtacacaggattcagtcatcaagatgggcaagatcatgtttcatccctggattctatgattccagagctaagatcttctgatctctcagccaatcctttttcatagctccatagtggtacagagatatggaattcccatagaattgggcattccatggatgtgcctccatataagtgagcacataagcgattgtgatgtcacctagattctcttggacctaagaatacctataacagtgatgatcattatatttgaaattcttttttttttttttttttgagacagggtctcactctgtcgcccaggctggagtgcagtagcatgatctcggctcactgcagcctcaacctcccggactgaagcaatcctcccacttcagcctcccaagtagctgggtctacaggcacatgccaccacgctcatttaacttttttattttttgtagagacagggtcttaccatgttgcctaagatggtctcaaactcctgagctcaagccatctgcctgcctcagcctcccaaagttatgagattacaggcatgagccactgtgcctggcctcagaatacccttattaaatgacaaataatttaccagggaaaagttacatactcgaattctgatacatgaaaacaaattagtttctcaaaacaaccttgtttctcagatcagctagtaggaatccaagagagaagacataaaacagtgaagtttagattggggactgaagggaaggaaagcaacagagatagaggcaaggcatcaaacatggaattgtacaactgaaacagaacgttgcttaagatgaactttgccttctttgcagggtaatgtaagtcaggacattatgtaaattaatgtatgtacttttatgagaatcagtttttaaagatcacagtattcacacttccaaataaacagagtgactcactactgaatttatgaagaaacttgggtagtggtgagttgctttgtttacttgggataaatgtgaatgtactaataaccagaggtaaatcacaagaaattttccatatggtatggatatcaccattattaggtgaattaatcaaatagtaatgtttttattttgtagcatcttatgatttatagagtgctgtcacatagtttatatcctttcctcccctggatagctgatttataagccattaaattaaggaacatgggggaggggtgcaggaaggaccatctgtgaaagtatctccttaaccaaagttgactttgctggtcttggatccataaacatatctgctctcccctctgtacatctcttcaagtagacctatcagatgtaaaattcacacattctgttagatcacataataaaataagtctttaaatttgcaacataaaattttcaatgtactaccaaaaagtatcttcgtgatgtataaatacatttctccaatggattcactgaaggattctgtggttaaccgagataactagatttggacataagaaaaccagcaaaggatttgtgcactcagacacagatgcaaaagctataggtagagtcattttataaatctgagttatgcttaaaatgtggacttcagttttctagtaaattatgaacatcctcagtaaattatgaatgttattgtaatggtgtgtataatatagccccatctgaaaataataatgtgcatatatcaatcaggcacctaatttaaaagaagtaatgctcttccctttcattccagaattatttggcagtggcagtttggaaatcctatcagtctttcaagactattgtctaactgaaggatcccctaacctaacaaagttttagaacaattggtctagatttcaaaaagcaagacagccggaacatgtggaaataattcaagacctgggttcattgtagctcgcatttccaaacaaagttcttttcaatttctagggaaaacataaaaaaatggagcctcaaaactttccaagagcccagtggaagtgataaaaattcaaagcaaaaagtccaaatgttagtataaaaagattctagaaagcacggggatacttgtaagagtagagttggactctgtgttcccacccatactctaaccaaaaagagtcctaaaaaaaaagaatagcttgacaaagttaaaaagaaatttgagttctctccattacagctgctatgcaaaccaatagacctgcagagtaactgtcttagcaattcagtaactccaaagtttaatatagatggtagttgctttcaacaactgcagatataaattgtgtgtgatggtacacaccaatagtcccagatactcaggaggctgaggcgggaagatcacttgagcccaggagtttcgaggccaacctgggtacctatctcttaaaaaaaaaaaaaaaaaaacaaaaaaacctgaagagaataaattataagattcatattccaattaaaatcttgtactgctctatgttaatgatccacattcatgaaagaaagtgtttggggccaggcatggtggctcacgcctgtaatcccaggactttgggaggtaaaggtgggcggatcacttgagccgaggagtttgagaccagcctggacaacttggcaagaccccagctctacaaaaactataaaaattaaccaggcatggtgctgcatgcctatagttccagctacttgggacgctgaaatgggaagatcacttgagcccaggaggcagaggttacagtgagcggagatcacaccactgcactccaccccgggcaacatagcaggactctgtatcaaaaaaaaaaaaaaaaaaaatctgtttgagacaaagaagtagtccatcatattggctttggagctaagctctacctttaagaatcaaggaagctttagttgtaaagcatatttcatagtgattataacccaaaaatttaaagtagaggcataaatgaaagacgattgtactgtaattagatgatttggatccagttttgtttcctctaaatgcctgtgtgtccttcaacaaatcagttaatttcacaactgtctatttctttgagtttaaaataaaaatgattttttctgccttttgatgtaaacgtatgatgcatgtgagagcttttcagaagaggcaaagtgttacttaattagaaaaattaaaaatcctcatcattattacttttcgcccctactacccaggagacacttagtttctttgctctatttcctgtctctgaataatacatgcttgacatgtgtccttcctctttggaatttaaactctgaaactcctttatactccttagattgctcttgaatattcttcataacaagaatttttttatttcttaacaatttttataacagtaaaagaaaattcctcacctaaccactctttatccactgctaaacaaaccacggaggacttccttatctctaggagtttctttcattcacttactgcagcttcataaaagttgtgagaaaggaaactaagagttaagggcatgtttgaaagcaacagaattagagagaaaaaaacaaagataatacaaaccatcctgtcagggaagaaagcagtgctcccctctacccccttcatcaagagaaaaaagcagaagtcaaataaaggaatggaaatgaaagggaaagacagagaatacaagaaggataagccttggtgtcaacatggatgtggaaggcaagcaatagggcaaattcaaagataaccctggagcagtgtgatccctacactagcagcatgcaaattatgttcccccacccttcacccccaccccagacatcctaaatcagaaactcaggcaatggagcctagaaatctgtgtaacaagccctggttcatgctgaagttgagaatcaattccctagagaggtgagcctgggtaattagaagaatggcatcaggttgcttttgttacataacattttttaaaattccactaataagaatctgtttagaaaaagtaaatcaaaattatggatcaaagcttgattttgtagtggataaattatatcacagaaactaatcactcacatatgaggtaagttgagtcttccaaattacataggtcacatggcaaatgtatcccttctggtatttagcaggactgacttgtattattcatatcatcatgtattatctttacaccttccctttagaatgtaaactctgtgagagcggaaacacacacacacagagacatacatttcacacacgtatatatacatgtatatcacactttcacatgcccattcatttggtcaatgtgcacattcaccgaaaaccacctgatctccaaaaactattgaaataaaataaataaaagaaaattttaaaatgtgaacacgctttccaggagaatttaattcaagggacttatacacagatacattcttttcacagcaagagttttaaatttctttgttttttctctttttttatttgctatagaatatattgtacacatatctgtgttcacactttcgtgttttttttttacccacaagagataaatattttggcgttttctgaatcatattatcaacagcccgttcactggtgactgtttttagcccattggtatcctctgcacatacggtaattttgcttattactttgagaagttcagctatttcagccatgaattcagtgtaaatagacatagtaacaatagtagcataacaatgttggtgattgggccataatagtcatatgaagataatgtgttaatcctcatatggagcttggactattaattatatcaagccagtgggtgtaaagtaacaagtataaggcttggagtgagaaggccatgatattaccactttctggctgagtcactttggctaagttctgtaactgacctaagcctcagtttttcagatctgtagtacttactttacatgattgctctttgaattgaataacataatttatgtgaaaacacttaattatgaatgctgtaaaactatcaaagccattaatatgtgttatagtagcatcatacattttgcagcataatccagagaacaaggagttgttaacaagggagaggaagataatctggttgggctagtattatactctcaggtgctactgacttcttagatgaccttcaagatgttagtacaactctctacttggagatgctattttctggggatgttaatatccactctattcacaaaattttaagaaaagtcaagtagcatggatgaaactctccaaagttctgcttaaaactaaaatatcttagttgtcactgaagccacagatattttgtgaatgcagcatgttcccaataggcagtccctcttagcctcacagtccaagctggcaacaggatcacatcccagggaatgaacagaaaggctggcaggcaatcacaccgctgatatctcaggtgtgtgggccccccattttttttttgagatggagtctcactctgttgcccaggctggagtgcagtggtgccatctctgctcacttcaacctccacctcccgggttcaagtgattctcctgcctcagcctcctgagtagctgggattacaggcgcccaccaccatgcccagctaattttttgtatttttagtagagatgtggtttcaccatgttggtcaggccggtctcggcctcctgacctcaggtgatccacctgcctcagcctcccaagttacagggattacaggcgtgagccacggtgcccagccgtgtgggcccccttttaaacagacgtctcttgacggagactagactctgcagccagtaaaagctccatatgattccatctgaatgtacttccattgttaatatggaaccttccccattttctggtcgtgtcttgatgttccccattcagaggacctggactttcaagtgttccttctgctttcctcaccagtggccaccttctgctacccaccttctcctctttctcctccttccttgctgcctgctgtctcatcaagcaccctgtcttggttttttgacccatcactgtactcacgaaagaggagggcattgtactagggcagatgatggggaggcagagagaacaggagagtcaggtaggaacagtgcttctgaaaaatctcctgataacagcattcattgtctttttcacagctcaggagaagccttggttaaaatgaggggaaaaaaatcagtagaataagtgggttcttgctgagcccccagtgcaagaggttcctattcaaaattggggtgtctttacccattaggatggcttttacttgaactttgtgagcttcaggcagaaccctctgcatcttctaacctaagcaggatctttcttcctttttttttttttttcacttttcagtcatggtagagttaagtgtcagagctggtccttgagaagaaggtgatgagcaggcattgaaaaattgagaaaaacgtatacttttaccacgcccaacacccttggcaaggcagtaaagggcactgcctccccctcagtttcttcccttgctgtttggtttctgtgcctccagtgctcagtcacgggtttcctaggaaatcctctgtctgtgctctgtgctgacattttatccatataccacttcttgccattcgcatatgtaattgagagagtagacgatacctttaactctgaattacatagctgcaatataatcacttgttttactgattatctgaaataattttttaaaaattcaggattgacttccatatgccatgcaagtcattttgcagttggtttcatttatccttggttcctttgtgatgaatggaacagtttaatttttcttaaaatgaccacatgctctgtactaagtgctttatctcttcaattttcaaaacgccttcacgagacaggtacttactatattattctcaagttatagataaggaaactgaggcttatagaggttaaatgacatgcccaagtcactcagccaaggaaatggaattcatatctgactcctacatctgtataggcccaaaatggatcatttaaagtgaaggaacttatatgaccttccccttgatgttataattcaattatccactttttactttgtgtccccttctgacaaatcagacttgccattcctgaccataggcttaaacctggaaaaccatctctgaccatttatcttcactttttgtttctttacttggagagcaacaatcgacagacctcatccattttatgcataatgtctaaaaccattttgggattgctgtaagtaatatgcaagaaaatagtgggaaaaaaaattttcttaaaacacaatcattcattcctgctgagtgactgcgtttcaaattcatacagaaatgaaagttgtgagcacctcactaatctgaaaatataccccatttagtaagacagtttctgaaatacctacacttcaccatcacagcaccttaataattatagagagcaccttcctttaaggagctcccaagttctttgcaaacatttctctttattaagtaacataccattgttctgtggcagggaagggaacaggatactttgtcttatttaaaatgtgagactgttaatgcattcagtgactaagtaggttgcccttgggtcattcactgacaaggccaggactagagtcctcaggggttgcagtccaccacggactcaggaccactaaatccacaaaggaccatgtgcaactgcctggtccaactcttcacatacagaaaatgaaataaacccagagaaatgaaaacacttaaaaagcccagggtcacatggataattaatggtagaaccaatactacatgcacacaaacaacatacctatatatgctatagagagaaacatgacaactatgaggaatcaatttatagacagattagaagagtgtgaaaataaagtcttcatcagtgaccttgcctcgaggaaaaacacacagaaggtgaaagtttcaaacagcagagcattttaacataggtgaagtttcaacttcttagcagccaaaataccatctggaatttaaggcacgcttcccataaaaggtgacaggtggacatgttttaaatgatagttggccagcctatcatagcctctataaatcgtctgaaagcatgaggatagcaaagaccagctgacttccaggcatgtttacagctgacagaaatgtttcagctaaaaacatgcatgactgtctctcttagggaatctcttacttcaaaaaaaaaaaaggtaccaatgtaaacactatgcatagactgaagtcttcagcaaattgagattattagcaatgaggcttccctaacctttcctgttttaatctaaaagtaaaattatcttctaaccatgtgatcttatgcagcatactgtctggtcagtgtgcttcaaaacatatctgtttatgtttgaaaacacaataacaacaaattcctgatgagagaaagtttaataaaatggatcatgaacatacagcacttaataccaaccctgctacatagtcagcacttaataccaaccttgcttcatagtaagcactcaatacatggtgattgttttcattgctgctattaccataatacatcaaagctctcctatttcataatgggaaaaaatgaaaaacagtcaaggcatatattttaagtggaagttagctcaaattttaaaagacttcttaccttgatgcatagtccaaatgttgaaatattatcctaaggagtttcagaggctttcagttttagtttggatcatggaaggacttttttctctgaggtgagggcctacactgggcagtcaggaatgaggtggtagagatggaccaaacacgcagttcatctcacctgtcaggagcagagctgagaacaaacagcacaaagaaaacaagtctttaagtaatcatcttaaagagatgtcacggacccatggactttaagaatacctcatgcactgagtattattatttaccttactgtttgtaacaaacttgatcatttggtttctaagccaaaccaaagcagtaaactgaggaaaaacaagggtttccgccaacaggctgagagcaaaggaggacgcaggaaaactattttaaaaattgacccaagagttcaaaaggcatatggaagcatttaatgggggtgggaggtatccttgtaataagaataccatgcatgtattcccacactgctcttggtggtctgcaaagtgatttcatatgtattttatgtcaacaccagcacaatgaggtaagtaggactgtatacctcagaggcatttggtgatttgtcagagtggagtgtagtgtgttggtgcccagatttgaataggatcatttgagtctgatatcatcatgttgcccaccgcctactcagcctctacacccgatgaggccaatctgcagctcactacagtcaatagagaacaggcaattaacccttaagttatattttagaaagatttctgtctaaaatagataaacttgaaagtatagctcttcaaaataacgtattcctgtgttggcaaatattttccaaactcacaatcaacacataggtgtatttcttagactactagaagtggggacttaccccaaggaaccaagctatagtgaccaatatccttagttctcaaggattctagagcaccccatgtctccaacgatctttcttctctcttatttcttctatttgtttgataatgttaatgggaaacactaaatcccctaatcaggacactgaaagtgacccccttcaaaagtagccctcccttttccacggagtgaccttgaagacttttagtggggaatatctggtagctttccaagaaagccgttttatggcacagggaaatggaaaacaaaactgtcctggcatcaccataaagcaaaatttctctgcacatgagaggctaggagggcctggatttttccaaacgaggatgatccattaagcaatcaaattttattttttaattgttttatttttcttttttgttgtcttgtttttcctgtccttcattctctatcccttgctatgtctcgctctgtcctgcttgctgtctcttcctacatcaacaggtgagaagccccaccaatgcagcatctgttggcgctccttctccttaaaggattaccttatcaagcacatggtgacacacacaggagtgagggcataccagtgtagtatctgcaacaagcgcttcacccagaagagctccctcaacgtgcacatgcgcctccaccggggagagaagtcctacgagtgctacatctgcaaaaagaagttctctcacaagaccctcctggagcgacacgtggccctgcacagtgccagcaatgggaccccccctgcaggcacacccccaggtgcccgcgctggccccccaggcgtggtggcctgcacggaggggaccacttacgtctgctccgtctgcccagcaaagtttgaccaaatcgagcagttcaacgaccacatgaggatgcatgtgtctgacggataagtagtatctttctctctttcttatgaacaaaacaaaacaacaacaaaaaacaaacaaacaaaaaagctatggcactagaatttaagaaatgttttggtttcatttttactttctgtttttgtttttgtttcgtttcattttgtactacatgaagaactgttttttgcctgctggtacattacatttccggaggcttgggtgaataatagttttcccagtctccctcggatggtggccttaaggcctggtagtgcttcaagaggtccactggttggatctctagctactggcctctaaatacaacccttctttacaaaaaaatcttttaaaaaaaagtaaaaaaaaaaaaaaaatttccacttgtgaagagcactacaaaaaatatataacaaaatctaaaaggcctactgtctttaagtacaccgcttgcagtgtttcagtggacattttcacaattctggccgcttggacttcacagtaaccagttaaaactgtggaatatcacttctggttgaaaacccagaggaaaggccctgctgttttccacctaccacgttgtctgatttcataaaagggctgtgggggtgggaagggcagtgggttcggtggtgtgggaaagaaagacgaatggcaggcttcttccccagattctgcccgggtccacacaccctggcccaccttctccatatccccctcttgcagcagaagccaggaagacttggacaagcaacaagcaacagtggctatcgtatttattcagtgtcttcgctgagccacagcctcagcacaatcaagagggactttcatgaaaggcaggaatgcagataaaacaaagatatcagaaatttgcacctatgtttctaggtacaagagaaggattatttccaacaatctttgc

SEQ ID NO: 327 - DNA, 3589 bp, Homo sapiens
cacaacatcaagagcaggaaaatggactcattagggaggcaggcagtcattaccactcacactgtacttccagggagacaccgattataagaagagaaactcagcgctggggaagaagaattgatgaattgcaagtttgtgccccatagctgcacagactgcctgaagttacatttagagactgaaatcactgcaccttaaaaacaaaagattgagctgcactgtattcctaatgtttcatcattactaacaggatattcctcatgacattgctgtctggctttgaagaagttctaagacagagctccttacagggaagcatctctgtgcattcagaagagaagaacatttctgagtcctcacgaaactatttcaatgcagccgctctctgctccctgccccaatgaacatctgcactaggcccaagccttggagtaatttacctgaagagtgacaccattgattttgaaactactgaagaaacccaagacagctgaaaaccagaaggcatctgaggagaatgagattactcagccgggtggatccagcgccaagccgggccttccctgcctgaactttgaagctgttttgtctccagacccagccctcatccactcaacacattcactgacaaactctcacgctcacaccgggtcatctgattgtgacatcagttgcaaggggatgaccgagcgcattcacagcatcaaccttcacaacttcagcaattccgtgctcgagaccctcaacgagcagcgcaaccgtggccacttctgtgacgtaacggtgcgcatccacgggagcatgctgcgcgcacaccgctgcgtgctggcagccggcagccccttcttccaggacaaactgctgcttggctacagcgacatcgagatcccgtcggtggtgtcagtgcagtcagtgcaaaagctcattgacttcatgtacagcggcgtgctacgggtctcgcagtcggaagctctgcagatcctcacggccgccagcatcctgcagatcaaaacagtcatcgacgagtgcacgcgcatcgtgtcacagaacgtgggcgatgtgttcccggggatccaggactcgggccaggacacgccgcggggcactcccgagtcaggcacgtcaggccagagcagcgacacggagtcgggctacctgcagagccacccacagcacagcgtggacaggatctactcggcactctacgcgtgctccatgcagaatggcagcggcgagcgctctttttacagcggcgcagtggtcagccaccacgagactgcgctcggcctgccccgcgaccaccacatggaagaccccagctggatcacacgcatccatgagcgctcgcagcagatggagcgctacctgtccaccacccccgagaccacgcactgccgcaagcagccccggcctgtgcgcatccagaccctagtgggcaacatccacatcaagcaggagatggaggacgattacgactactacgggcagcaaagggtgcagatcctggaacgcaacgaatccgaggagtgcacggaagacacagaccaggccgagggcaccgagagtgagcccaaaggtgaaagcttcgactcgggcgtcagctcctccataggcaccgagcctgactcggtggagcagcagtttgggcctggggcggcgcgggacagccaggctgaacccacccaacccgagcaggctgcagaagcccccgctgagggtggtccgcagacaaaccagctagaaacaggtgcttcctctccggagagaagcaatgaagtggagatggacagcactgttatcactgtcagcaacagctccgacaagagcgtcctacaacagccttcggtcaacacgtccatcgggcagccattgccaagtacccagctctacttacgccagacagaaaccctcaccagcaacctgaggatgcctctgaccttgaccagcaacacgcaggtcattggcacagctggcaacacctacctgccagccctcttcactacccagcccgcgggcagtggccccaagcctttcctcttcagcctgccacagcccctggcaggccagcagacccagtttgtgacagtgtcccagcccggtctgtcgacctttactgcacagctgccagcgccacagcccctggcctcatccgcaggccacagcacagccagtgggcaaggcgaaaaaaagccttatgagtgcactctctgcaacaagactttcaccgccaaacagaactacgtcaagcacatgttcgtacacacaggtgagaagccccaccaatgcagcatctgttggcgctccttctccttaaaggattaccttatcaagcacatggtgacacacacaggagtgagggcataccagtgtagtatctgcaacaagcgcttcacccagaagagctccctcaacgtgcacatgcgcctccaccggggagagaagtcctacgagtgctacatctgcaaaaagaagttctctcacaagaccctcctggagcgacacgtggccctgcacagtgccagcaatgggaccccccctgcaggcacacccccaggtgcccgcgctggccccccaggcgtggtggcctgcacggaggggaccacttacgtctgctccgtctgcccagcaaagtttgaccaaatcgagcagttcaacgaccacatgaggatgcatgtgtctgacggataagtagtatctttctctctttcttatgaacaaaacaaaacaacaacaaaaaacaaacaaacaaaaaagctatggcactagaatttaagaaatgttttggtttcatttttactttctgtttttgtttttgtttcgtttcattttgtactacatgaagaactgttttttgcctgctggtacattacatttccggaggcttgggtgaataatagttttcccagtctccctcggatggtggccttaaggcctggtagtgcttcaagaggtccactggttggatctctagctactggcctctaaatacaacccttctttacaaaaaaatcttttaaaaaaaagtaaaaaaaaaaaaaaaatttccacttgtgaagagcactacaaaaaatatataacaaaatctaaaaggcctactgtctttaagtacaccgcttgcagtgtttcagtggacattttcacaattctggccgcttggacttcacagtaaccagttaaaactgtggaatatcacttctggttgaaaacccagaggaaaggccctgctgttttccacctaccacgttgtctgatttcataaaagggctgtgggggtgggaagggcagtgggttcggtggtgtgggaaagaaagacgaatggcaggcttcttccccagattctgcccgggtccacacaccctggcccaccttctccatatccccctcttgcagcagaagccaggaagacttggacaagcaacaagcaacagtggctatcgtatttattcagtgtcttcgctgagccacagcctcagcacaatcaagagggactttcatgaaaggcaggaatgcagataaaacaaagatatcagaaatttgcacctatgtttctaggtacaagagaaggattatttccaacaatctttgc

SEQ ID NO: 328 - protein, 662 aa, Homo sapiens
MTERIHSINLHNFSNSVLETLNEQRNRGHFCDVTVRIHGSMLRAHRCVLAAGSPFFQDKLLLGYSDIEIPSVVSVQSVQKLIDFMYSGVLRVSQSEALQILTAASILQIKTVIDECTRIVSQNVGDVFPGIQDSGQDTPRGTPESGTSGQSSDTESGYLQSHPQHSVDRIYSALYACSMQNGSGERSFYSGAVVSHHETALGLPRDHHMEDPSWITRIHERSQQMERYLSTTPETTHCRKQPRPVRIQTLVGNIHIKQEMEDDYDYYGQQRVQIRNESEECTEDTDQAEGTESEPKGESFDSGVSSSIGTEPDSVEQQFGPGAARDSQAEPTQPEQAAEAPAEGGPQTNQLETGASSPERSNEVEMDSTVITVSNSSDKSVLQQPSVNTSIGQPLPSTQLYLRQTETLTSNLRMPLTLTSNTQVIGTAGNTYLPALFTTQPAGSGPKPFLFSLPQPLAGQQTQFVTVSQPGLSTFTAQLPAPQPLASSAGHSTASGQGEKKPYECTLCNKTFTAKQNYVKHMFVHTGEKPHQCSICWRSFSLKDYLIKHMVTHTGVRAYQCSICNKRFTQKSSLNVHMRLHRGEKSYECYICKKKFSHKTLLERHVHSNGTPPAGTPPGARAGPPGVVACTEGTTYVCSVCPAKFDQIEQFNDHMRMHVSDG

SEQ ID NO: 329 - DNA, 3214 bp, Homo sapiens
atgcagccgctctctgctccctgccccaatgaacatctgcactaggcccaagccttggagtaatttacctgaagagtgacaccattgattttgaaactactgaagaaacccaagacagctgaaaaccagaaggcatctgaggagaatgagattactcagccgggtggatccagcgccaagccgggccttccctgcctgaactttgaagctgttttgtctccagacccagccctcatccactcaacacattcactgacaaactctcacgctcacaccgggtcatctgattgtgacatcagttgcaaggggatgaccgagcgcattcacagcatcaaccttcacaacttcagcaattccgtgctcgagaccctcaacgagcagcgcaaccgtggccacttctgtgacgtaacggtgcgcatccacgggagcatgctgcgcgcacaccgctgcgtgctggcagccggcagccccttcttccaggacaaactgctgcttggctacagcgacatcgagatcccgtcggtggtgtcagtgcagtcagtgcaaaagctcattgacttcatgtacagcggcgtgctacgggtctcgcagtcggaagctctgcagatcctcacggccgccagcatcctgcagatcaaaacagtcatcgacgagtgcacgcgcatcgtgtcacagaacgtgggcgatgtgttcccggggatccaggactcgggccaggacacgccgcggggcactcccgagtcaggcacgtcaggccagagcagcgacacggagtcgggctacctgcagagccacccacagcacagcgtggacaggatctactcggcactctacgcgtgctccatgcagaatggcagcggcgagcgctctttttacagcggcgcagtggtcagccaccacgagactgcgctcggcctgccccgcgaccaccacatggaagaccccagctggatcacacgcatccatgagcgctcgcagcagatggagcgctacctgtccaccacccccgagaccacgcactgccgcaagcagccccggcctgtgcgcatccagaccctagtgggcaacatccacatcaagcaggagatggaggacgattacgactactacgggcagcaaagggtgcagatcctggaacgcaacgaatccgaggagtgcacggaagacacagaccaggccgagggcaccgagagtgagcccaaaggtgaaagcttcgactcgggcgtcagctcctccataggcaccgagcctgactcggtggagcagcagtttgggcctggggcggcgcgggacagccaggctgaacccacccaacccgagcaggctgcagaagcccccgctgagggtggtccgcagacaaaccagctagaaacaggtgcttcctctccggagagaagcaatgaagtggagatggacagcactgttatcactgtcagcaacagctccgacaagagcgtcctacaacagccttcggtcaacacgtccatcgggcagccattgccaagtacccagctctacttacgccagacagaaaccctcaccagcaacctgaggatgcctctgaccttgaccagcaacacgcaggtcattggcacagctggcaacacctacctgccagccctcttcactacccagcccgcgggcagtggccccaagcctttcctcttcagcctgccacagcccctggcaggccagcagacccagtttgtgacagtgtcccagcccggtctgtcgacctttactgcacagctgccagcgccacagcccctggcctcatccgcaggccacagcacagccagtgggcaaggcgaaaaaaagccttatgagtgcactctctgcaacaagactttcaccgccaaacagaactacgtcaagcacatgttcgtacacacaggtgagaagccccaccaatgcagcatctgttggcgctccttctccttaaaggattaccttatcaagcacatggtgacacacacaggagtgagggcataccagtgtagtatctgcaacaagcgcttcacccagaagagctccctcaacgtgcacatgcgcctccaccggggagagaagtcctacgagtgctacatctgcaaaaagaagttctctcacaagaccctcctggagcgacacgtggccctgcacagtgccagcaatgggaccccccctgcaggcacacccccaggtgcccgcgctggccccccaggcgtggtggcctgcacggaggggaccacttacgtctgctccgtctgcccagcaaagtttgaccaaatcgagcagttcaacgaccacatgaggatgcatgtgtctgacggataagtagtatctttctctctttcttatgaacaaaacaaaacaacaacaaaaaacaaacaaacaaaaaagctatggcactagaatttaagaaatgttttggtttcatttttactttctgtttttgtttttgtttcgtttcattttgtactacatgaagaactgttttttgcctgctggtacattacatttccggaggcttgggtgaataatagttttcccagtctccctcggatggtggccttaaggcctggtagtgcttcaagaggtccactggttggatctctagctactggcctctaaatacaacccttctttacaaaaaaatcttttaaaaaaaagtaaaaaaaaaaaaaaaatttccacttgtgaagagcactacaaaaaatatataacaaaatctaaaaggcctactgtctttaagtacaccgcttgcagtgtttcagtggacattttcacaattctggccgcttggacttcacagtaaccagttaaaactgtggaatatcacttctggttgaaaacccagaggaaaggccctgctgttttccacctaccacgttgtctgatttcataaaagggctgtgggggtgggaagggcagtgggttcggtggtgtgggaaagaaagacgaatggcaggcttcttccccagattctgcccgggtccacacaccctggcccaccttctccatatccccctcttgcagcagaagccaggaagacttggacaagcaacaagcaacagtggctatcgtatttattcagtgtcttcgctgagccacagcctcagcacaatcaagagggactttcatgaaaggcaggaatgcagataaaacaaagatatcagaaatttgcacctatgtttctaggtacaagagaaggattatttccaacaatctttgc

SEQ ID NO: 330 - protein, 662 aa, Homo sapiens; identical to SEQ ID NO: 328

SEQ ID NO: 331 - DNA, 40216 bp, Mus musculus
  misc_feature (1)...(40216): n = A,T,C or G
cagggtcagttttagttcccggtgaacctagcgcgtttggctccactgggaggtagcaagacatatttctaagcaaacgatcaaaagttaaggcaaggaagtgcggtatgtggaggttggtgtgcaagtttcttttggagacttctagaggcttatgacaggcgcgccatttggccctttgggtgagaactgcagagccccacgccagtaccgcctctgggtcgcctcggaggagctcgccggatgtacgcaaaggcgtgggggcggagctctggtaacccaggcaacggcccggaagccactttccgcgttcccccgtggcgggctctgtggttctggaggctgaacttttagtcggggcggaggcacagtcggccagcggcaaggcaggttggggtgaagcgggggcatagggcgaggagaagcggccggcgtctccgcctgggtctcggcgcccgggtgggcgtgcgcaccccagggccggccgctcgcctcgcagagcctgggagtgcggttccggggagcgcctggatcccccgcgggacagcgggccccgcgcacgcgcgccgcgttcccgcaccctgctggcgggagaaatcccgaggccggcgggtgatgcagttgtttactgtcccgctagggagtggcagagtatcgggtgttgggacagggcgcgtcctttaagttgagcgtttaggtgagggtttctaaggaaggggccgtttgaaagtttgggacaggcttgagcttgggagtcaaaaataggaaattgttccagacagtgcatggcactgcttgtgaaggtcacagctgggtctcagtatgggtgggagggaaaactggggccgcacgaagagcagctcttgaagttggatttttctctacagtgggctccattaaaatcttacgagggagtaaaacgttgagatccctgtatccctgtatccgggtaagattgatggcagggacagtgttctggttgtcccccagtttgttttcatactagttaaggtaaatctggtagaattccaccatccctccttaagagcaggcaagggcttccagtggtcttttgtatagccctcaaattgcaggggccctcagttagcttttagactgttattgttcagactgaaacaaattcggtaaatgttccacacacacacacacacacacacacacacacacacacccacttgcagagaacattttctttctgattttctccccccatccccctttctttttttgtttttttcaagacagggtttccctgtgtagccctggctgtcctggagttcactctgtcgaccaggttgtcctcgaactcagaaatctgcttgccccagcctcccaagtgctgagatttaaggcttgggccaccactgtccagcattctgattttcttttatttactctttattttcagcccgactttgtggagggaattaaggagaggaggcagcttttcttcatgtgtattgaagattaggaacttccttgacacaaagaattaactttcaggcttgccttttgtaagaagttgtttagttatgatcttttgagaaacgtacctctgagagggcacaggctacttctctgttttgttttatttggtgcctagcaagcactttgaaagttacttgatacgtggagtggatggatgaatgggaagaaaaccttacaggaaaattaataacaggctgttcagaattgttcctagtagaaatggaaaagaacggacagatgggcgggatatttcaaggaaggatttatagattgtgttacatagcagaaaaagagacagttaggaaccagaggcgatgcttacgcttaagccagagcaacaagaaggatggcaattctctaagtttagtaactgagtcaaacagttaggtatctagatctagaggattgggagggctgtgccaaacgagctgcatcttactatactctgaggtgtatggaagggcagtgaatgcacagcaaaggacgcttgatgttttagggacagttaggaaacattcattagaaactgtctagttatggtcctttagttatgtgtctgtgtgcccggtataggaatagctttgctgagaggtttctgagaatcactaagggggctgttggacctcacgatggtccagaaagcaagctcagtggaagttggcatatgactagactcatttgcagtttactgccattgctcacatccagtgcgtgggggtgtggtagggttccccagtattgggtgaagggacacgtgtaagaggaggacaggacagggatagaccgagatgagggcccttggctacgttttccaaggaaagagtccagcgtagtctgaagaggaaagagtagtgaaatagcaggaaaaagggtgttgtggaagccgcggaagaggaaagtgcctgagaagtaaggaagggtttgcactcttagcgttaggaagcagttaacgttcctcattttctccacactggccccacttctgcagggtgctgcgatttattgactgcccttaaaatacctctagtctctgttatgcctcaaacaaacagtgctcatttccctcagttccccacaactgcctttgagaggtaaacaggcacatggacctttaaccccttttagctacttgtaagtttttgtatgcgtcagattcatgactgtttccagggttgaggctggtagagttttaacttatgaaaaaaaatgtaatattttaaatataatttgaaataaaaattccctcccttttgaagagttgcttgtttttacccagcaaagttgatccgttgtttgtggtttcctagcgtatactttatagtcaggacactgagtgtcagttccttcctctcctcattgttatctgtgtcactgtgagcagtgtgattctgtcctcatttgagaaaagaggtaaaaattgtcactgatgtcatcaacacttaaataggacttagtatgtgtcaggcaggggttccaagcagcttacctatttaattagcttcattttagggttatcaacagagcgaatccatagactttggttccaggctgtattcttagccactgtgctgtgctatctcttaagacagtgtatgtctcacggaattgtgggattagtgctaaggctcttcattatcaatgcatatatattaacatcaggtagtttatacatgcagttcttgttttttgcttttttacatttaactttttctcacaggtgcatatggtgtgtgtgtgtaggtcagaggttgatattgggtgtcttggttggttcttctctatcttataaactgtagtagggtacctcccttgaatctagaacttgctaatttggctaatgtagctagccaatttagggattgcctatctcttctcctgagccctgaggttacagggctgccctgcctcctggttctcatagttaatatactcaaacttcattcacattgtagcatgtgtcagtactttatatcttattgccaaataacatcccagttgtatagatatgtcacatatttatgtagtcatcaattaatgggcattttgagatgtttccacttttgtctattaactataatattattgtggacattcacttacagggttttctttggactaatgtctttaattctctttaatggttatgtaggagaatttctgagtcacatggtaatgttgtttaaatttttgaataacttcccactggtcttccaaagcgcctatgtaaatttacattccaatcaaatatatgaaggttccagtttcttcaaacttgtgccaatacttttttttttttttttttattaaagtcacccttgactggttttgactggcatttaattatgttggtcactttttaaaaaaggtttaccttgttttatattgtatgaatgctttgcctgtatgtatgtgtaccgtgtgctgcctggtgcctttggtggatagaagaggttgtcagatctcctggaaccggagttacggatggttgtaaaacaacatgtaggttgtgggaattgaactcaggttctcaggaagaacagcaagggttcttaaccactgagccatctcaccagtccccatattgacaatctcttctttttatgtgcttatttaccatctgcagtatcttatttggagatacctattcaagacctatgcccacttaaatttggttgtttgactagtccagttatgagaattttttatgtatattctagataccgggtaagtgatttgcaaataacttttgccactgcattaggtatcttttcactttttttgattatacctttgagtacaatatttaaaattcttgatgaacccaactgtcctccctacatcttggtttcttgtgcttttggctctgttctccagcctgacctagggttcacagctctttacactcatgctttcttctaatagtcatacagttttagttctgacattttaatatatgacttcatgttatatgctaatttttgtaccctgtatgaggtaggagtcggactttttcaaaggaatattgaaaacagtgctctttgaagtgaattgctttggcaccttgttggaatattagtgtctgtaaatgcagtggttcattttgacttttgtctgttccatgtccggttaagtgctggctgtgtttctactgcaagtgaacttcacagttggttaactctttgccccttagtttcctcatctataaaatgagtaagtagtaagcacttcatggagctgttgtaataagagactaataggtgcaaagagcttaggacagtctgcatgtagtaagaacctagactgccttagccgaccttcgttgcttccgctacagcggctactggcatcaccactgtaagacttagttgttgtcgacagatggtgctgagaagatcttgtttctacgtacaactgcaaccagatcccttcccccactttgtaaaacttctgttcagacttgatcagtagccttaatggaaggtgatgtgaagccaggaaaactctcaagatacaggcacaggcagaatctttctgtgtgagactgttgacaaatgtgtgctgatgagctgcccggtggattttgctaccaatgtttatccctgacgtctacatggtggtaggaggaaaccaactcctgcaaactgttctctggccctcatgtgtacagtgcgcatgtgctccttcttcaccccagagataagcaagtaaaggtaatgaaaggattgacagagatgttaggccctttcaaaaagttgcacacttggaactcaaagaggaagaaataaccttcaatgtgggtaaaagtacttccctattgtattgtagttatttgacagggcattgataaccagaatatagaactttgaaaaaactaaacacacacacacacacacacacacacacacacaaaagacatcgactaattagtaggcaaatgaaccaaacagttttcaaaacaagtacaaatgaccaataaatacaagagaaaaatgttccggagctggatggatggctcagtactattcttctgaaggactggctgagtttggttcatggcacccatattgggtggttcatgatcacccataactctgactttaggggttctgacatcctcttctggcctctgtatacatagaaatagttttttttatttttattttttaatactcagtatcttcagacatcagtgaaatgcaaacaaagccccattgagagtctccctcaccagaatgactattttcatcaagaaaaatgacaaatactgtgaggatattgggagctgaagaggagcccctgtatgtcgctgttgggaatgtaattagtacaaccaatatagaggttcttcaaactaaaaacactgaaaggaccaccttatgattgtggttgtaccactcctggctatgtacccaaaggagtctgaggccaccacaggcatacctgtgcatccgtgtttattatgatactgttctcagtagaagtcaagccaggctgtgaattcagcctagatatccatcaacagataagtaggtaaagaaaatgtgatgtatatagagaatatttatccagccacaaaaagaatgaaatcctatgtgcaggaaaatagaactaagtggaaataaaccagactcagagagaagtattacttgttttctctggagttcagaaacagatgtgaaagtaggagggaaacacttgattgtttgtgaagagggaggggaccagttggagggggaggagagaggacagttggtggatagaatcaaagtatgtatgtacatgtatgaaaacattacaaaactcatataagttaacaaagtttgaaataaaaataggtaaaccaagtctgaattgttggtctgccataggggtcagtgtgaggaaacttgcctggcatagtttacacctgggcatcaatttaagcctagcaccacaggaaaaaacaaaataagtagtcatcgtgacttacctcctttgctggattgtaagctctgaaattagacaacacgtttagagagtaagaagtagcaagagaaagacagtatagagagctggaaagactgtgttagggaaacactggagtgtaggcatcgttgtcacagtaaattattttattaaaagtacttaatggaaggggaaggggtagcttaagagtaccacacttgcctagcatgtgcaagggtctgtggtctccactggggagagagacaggtatgggcgagggacagtgatgacagcaggacagtcggctagtaaggagtatgagggttagcctcacagttctgaagttattttggtgggtggataatatgtcttagtgatggactttgagttaccaataacgtgtgaatacatgaaggaaagaagcgcaagcacttccttttggggtcatttaagcaagagggagtacagatttgaatcctccactccatactgcctgtgtcttcgtcctctgtctgtttataagtctgaatttgtgcttgcccaaagcctggcttgtaaatctgtccaagtgtctgtatgtatgggtgtgcaattatctgtatttgtatttgtgtgtgtgtgtcttgtgtgtttctgtttgtctgtctctaacaaaggtttgctctttgtttcctgaacagcatagaaagcatcacacggaataaaatgtaattcttttaaagaatgggatactttacggaaatctttaaaagactctacaagggattaagtcactgcctctaaatgatcctaactgacccacataacaaactactaccaacaccgttgcttatcaaccagtcttcctaagtgggaatttatttgagaaggttgctacaacctctgaatttgttgctttcaccaaagggtgtacatgcactgtcctgggtcagggtcatgaaaaggtacctaatttaagatcatgcctatgccattagttttggttgcacaagttgattacttggaaaatccaaggaaagtagggtttattgttacatagttctcttaaaggcggattaaacaaacaggatgagtacatgtaagacagacagcttctaagagatttcagagttatgttactaagaactttggctgtgaggcccagtaagagttccagtctctttgaatgtaagggatattttcgtggtattgggttgccacagaaggcaaagagacccagaagtagaagtcatgcatactttggtttttacagtcaaatgtgtggactgtaaaaaccttagctttcaagcacggtggactgggggtctttccctaactttttatgatgtttagcccccgcatggcgattttgattgccaggctattgctggtaatgtacaaaatcacctccatttagtgctgcatgaagatttagtagaactggaagagacgctaacgttctctaaaacatgtatgcttctgaggtgagcacatgtgtgcctggcagggatgtgctacgttagcatgcttagagctgcacttctcacgcactgcacagctctggcgtttcctctgttaattgtgaactttatctgctgacaaagatacaaccattttcatttctattttaggtcatactttctatatttatcaagttctttattaagcaaaaggttttgttatttaaaacctttttgttgtggttattggctttgctttaatattaactgtaaaatgagaaagccaagcattcagagagcctattcctgtcatcatgaccaaattctcctgatattctgagagtggtttcgtttgtcctatagatgtgcccatgatgcataattattactttaacctttatttaaaaattaatgttttcagatgtcattgatcagagtgaaccgctttggtccccggggaggtggaagaaaaactctgaaagtaaagaagaaagctgcagtgaggcaagaatgggatgtgagtctgggcccacagcagcgtgttctggagggtggcctcagtactcctgtccagtgtggctggagtggcgctcaggctcaagtagggtcgggtgggtttcttggcatggttttggtcttggagggaagagcaggacatttgccccgttctcctttaagtgtacaggattaagggtaataacttctagttctttgcaagagttagagctgctgtgagactgaaactctatccccaaagatgttcctctgcagcttgccatagtgagcacagtttcattgttaaaatgctttacagttgcctcatggaatcctagtctctggaaactgtcgcttcagttaagtttactcacaacatgcaccctgtttttattccttgttttaaaataatagagccttatttccagtgtaacacctaaaaaatagcctattttctagaagatactcaaaagtaacctgttttaacgttatattgacagtactggtttctgaggaaaaaaggactgtggcccttaggattctgaatcgattttcagctactgaaactgaataactgttagaaatttataaggaaactttaaaaaagctcactctgtccttctttttaaagaatactgtgaatgatctaacagttcaccgggcaactcctgaagatctagtaagttgaccactgaaagttcaatcctgctttctgtattttatttggtatctggtttctaatctgcagaacagaaaccatcgtcgctccttgggacttgtttagttacagttaatcttgttcacgcctgtataaaacctgaaaggatatcctgcggaatttttgattttactaaggcttagcagccaccgttagaattctactcaggagttttggtctgtagtcctgtcacttatctagaatctcctgtggtctctgtctgcacttcctcagcatttttccattgttgtcattgctgttactttcacgacaggtttgggctgtgtagccctggttagcctgcccacgacaatgtggctaatctttctgtctccgtggatttgcctagccttgattgctctttcagatggactacaggatgtggtctgttatttatagcctctttgtctagcatattttgtagattcatccatgttatagtatgtatctctgcttcgttccttactattgtaagacagtattccattgaatggcagttctagatttatctgtttgtcagttgtacatctggtttatttctgctgcttttctgttataaagtaacaccatagcggatattcatgtacaagtctctgtgagcatatgcaggcagctgtgtgtgtatctggaatggctaggtcatgcatccatattggctcttataaatcactgccaaactgttttccaaagtgcttacctgtcttaaattccaccagtgtgtgtggagcttccaggccacacgccccattattgtcaccttttaattttaattctcctgctgggtataaagtactgcctcattgtgattctgatatgcatgctcacaattcttgattgttagtcctttggtagtgtgcatgtctgcatgattataactttattagatgacccgagttttgttcatattttcagttctgagcactagcgtatttgtaaagacaaatgtctacttttattcctcagtcacccccgtggactcttcccttccaattcttttaggagctctggctcctgtctcttctgcctcaggaactctccttccttggatgtctacatcatctgtgacctcagttccacatgaagccacttcagagctgtacaaacagcattgacttagaagtaatgcagttactgtgaaaggggtgtgctttgacaaagctgacttaggtggattttataccctttccatcatgtgtgaagtgtcagtgctgaccactaattgatattttagcactcattgcatgagttttaacttgtgagttaaagaacagtaggtgttttggtttctgtaccaatgaaggagaagttaatatttttgtatgtctttaagatagacctccaagttctcaatactttttctcttagatcattttgaaaacttagactatgaaagtgttagctatgaatgtacacacatactgaaccataaaggaataggaagtggtgaactagtgtaagtggtcttgcatagcagcaggcaatgtctttgttactgaaagcatttctttacagttttcgttctgtataggtgcgccgtcatgagatgcacaagtcaaagaatagagcattggtgcactgggaacttcaagaaaaagctttgaagagaaaatggaagaagcagaaaccagaaacttcaagtcttgaaaaaagaaagttatctatcatgaaggaggtattgtgaaaatccactgtctttagaggttttttctcttggattggtttcagtggaaagactctagttcttacacgaccttgcacagtgagctgtttggtagactcttcagagagcagcaggatgggtggggtcaagtgcagagagcagcaggatgggtggggcctagtgcagagagcagcaggatgggtggggtctagtgcagagagcagcaggatgggtggagcctagtgcagagagcagcaggatgggtggggtctactttgctgctttaaatgtactttccacaactcatcaactctgtaggcttagattatataactccttggcctgggtttgtttgtttgtttttgtttgtttgtttgtttgtttttcctctcttttctctttcaaccttttaaaaagtagcatacaaagtagcaggttcctcctgccactgtcctcatactaagttgtggatggttggtctcttccccctttcccattcctaccgttcccctgtcccactgaatccgctatctccagcatttcgagtttcctttcatatcatatgttcttcccactccttttgccagtttcatggccccataagaaaatgttttgacttctatacatacttactcctacctagatacacataattaattaagtagaagccaggattcacacatgagcaagcatatccagttctcatctatctgggttgcctaacttaatgtcatatttttcagttctatccattttcctacagatttgtaacatcattttccttacattagcttagctttatatccttaaatttttggctgtgttgttatgagagtttaattgcataatacttaaattgttttcttaatttcattatatgacgttttgtgttcatgtatgtctgtgtaccatgttgcttgcataggccagaagaaggtgtcaaatccctgagaactgcagttgcagccaattgcgagttgccatgtggtgctgacaattgaagctgagtcctctagaagagcagctagtactcttagccactgagccatctttccagtcctgcttttaaagagattaccacagtcttgggcaaaataattagtactatgtatctgtaaacttctgtaattatgtctcagttcaacagcatagtagaattacctggaaaaaatgaaataaaatcagataattttgtatgcgtgtttacctaggtcttaagccatttttctctggcttaaccttttgcctgcctgggtgtttgaagaagcaatcagatatgtagggtgaacagtgtgtcaagcaagaaggagctacaatagagcagccttttttatttggactgcagtcctaataaaggaatgtgtcgtgcatgtggccccttacccagggttagcgtacagtgcttgccatctgcgtggcctttcacggtggctttaagccataggctgccttttgagaagttccttagagttcttagaaaaatctgcatcgaggaaaactgtgtctcccaaataaatgtttataagacatgaggaaggaacagtggatcagagaatacgacttctcatgttataatcgtgagccagtcatgcacacatgttaattctcattgaacagtctaaaaccacagatctgacctcgagaccctctttgggaggttttctttttctagttttaatcttcttttccttttaatttttgaagatttagtttcatttgttttcttttttgtataagggtgtttgcctgcatctctgtctgtctgtctgtctgcctgtctgtctgtctgtgtgtctgtgtgtctggtgccagtggaggtcagaagaggctgtcagatttcttaaaactaagtcacagagaattctgagtatagatgggtgctgggactccagcctcggcaagagccataagcattcttttttttttttttaaattatttatttaatgtatatgagtacactgtagaagtatacttcttcagacacaccagaagagggtatctgatcccattacagagtgttttgagccaccatgtggttgctgggaattgaactcaggatctttggaagagcagtcaatgctcttaaccactgagccatctctccagccttcattttattttattttatttcttgttgccataagcattcttagcctgtgataaccactgagccatctctgcagctcccgtagcttttcatacaagtactaaatgtaggtgaagtaaggggacaagaagagtaatgaggggacaggtgcagggtctcatctgtggtgtggtgattctcagtcctgactgcacatgagacttcatcatggccaagatgctcctgaggagggtggggaaccactgtacctcaactctaagattcagagttagtgaagctaggtggggaggtttccccagttcccgtgtgtttttgtgttctgcagggtgttagaactgtagcttttggtgagatttagatgttttcttttactgtcttacttagtacagtgatctttggcctcatgaacaatctactccgaggaatgtgacggagactcagtaggagaaggcaaagtggtggctttacttgaggtctgactgtaattaatacccagtgtcaacagattagtaagattattcctctactttctgcctttgtcagtttctactgtagccatagccatgttgatttattatatatttattatatatatccattataagttacgcttcctaagctcttaattatatggacttggaagatatttcaccaaaggtagaaatttggttcataagacagtataatatgtattttaataaccctcgaagcatcatacaggttttcagtgtatccacacactaggacatccctgtagggtggaggtggtgattagattctattgatatgccagtgtatcttgaaagtcagtagttagaaataaatttacctttttaatgtctaggtttggatgtagatttgccataatttattattgttctatttatggacacttagcttctgggaataaaagaactcaatatagtaacttaaacaaaacacagatttagttctctcatggagagctcagaggtagctggtagagggtcccgcagttcttcagcatcctgaacacagggtggctgctacagtgtccttcagttgtttgcagggcaacagcaagtggaagtagagagtgtctgctactccttttatgccagccattggcactgtgtgctgttctccaggacactattgcttggaggctcctgtattcaaagatgggttggaacttgagctgcttccttgattaaaatgcaggagtcggctcaggcattgtggcccatgcctttagtcccagcactcatcaccaggaggcagaggcaggtcggtctctgtgagtttgaggccagcctggtctacaaagcaagttccaggacatccagggctgttacagaaaaaaaacctgtgtcaaaaactcaccacaaccaccaccaccaccgccaccaggaacttaggagttgctattaaagggcagtattagggataagtagtagtgtgtgccactcagattgcatcttatcttggcatgataaataatccagcagatagtcttcattgtgtttttgggtacaggcttgtttgttgggttaattattaacagaagcactaagtcaagggctggtgctttagctcagtgttagagcacttacctagggtgtttcagggtttactctcaagtactgggggaaggaagaaaagaaaactaaggatcaaagagcatgcgcatattttgtttcagtcactaaatttttctgtgcttgtgttgtctgtatttaatggatatgataggacggtaggcatatccctgatacaaaggcatggttgttaccatgttagaaaaataacacagcttattttctattgataatttgaagaatttactactttttgtttttaaggcattaccctgttagggtttcattgatgtgaagagacaccatgaccaaggcaactcttaaaagggacaacattcaattgggtctggcttgcaggttaggttcagaggttcagtccattatcaaggtggggcagggcagcatctatctaggcaagcatggtgttggaggagttgagaattctacatcatcatctgaaggctgctagaagactgtctcccacgtggttaggagatgggtctcattgctcactccccacaatgacacacttcctccaacaagatcgcacctactccatcaagaccacacctcctactagtgccactccctgggcaaagcatagacaaaccaccacacaccctctgtcaaagtaaagtcatggagctgacagagcagttaagtggaaaaacaatcttattaacaactacatgcccggtgtcaactataatcaggtctcaagtaaaacccatgctgtgcgccattgacgtcgcaggaaactaactaaagtggttagagtttatttactatttctagtgtgggccctaagcccagtattctgtacggtgtgtgctcttggcctttgcagttctaaagttactctatggaaggtacaaatggcaatctcattaactgacctagccggccggcccacttggccatggcagaaaggatagcagaagaatgctactcacttatatttctgtattgtaaaatagtaattgccatgtgatgtgattttctctattacagagaaattccactcagcgtgtttgatattagatgctttattgatttgagtcagggttagaaaaggagctgccttgattttaagattcctttcagctcaagaatgccatctggtggcagtaggcagagttgactcatctgtagcatatggctttgggttttgttgttgttgttgttgttgttgtttgtatttatttatttatttaggtatttatttcatttacatttctaatgctaccccaaaagtcccctaccctctccctcacccactcccccacccacccactcccacttcttggccctgacattcccctgtactgaggcagataaagtttgcacgaccaatgggcctctctttccactgatggccgactaggccatcttctgatacatatgcagctagagacatgagctctggtggggtactgggtagttcatattgttccacctatagggttgaagatccctttagctccttggttactttctctagctcctccattgggggccctgtggtccatccactagctgactgtgagcatccacttctgtgtttgctaggccccggcatagtctcacaagagagagctatatctgggtcctttcagcaaaatcttgctagtgtatgcaatggtgtcagcatttggatgctgattatggggtggatccctggatatggcagtctctacatggtccatcctttcgtctcagctccaaactgtgtctctgtaactccttccatgggtgttttgttcccaattataagaaggggcaaaatgtccacactttggtcttcattcttcttgagcatgtgtttagcaaattgtatcttatatcttgggtattctaagtttctgggctaatatccacttatcagtgagtacatattgtgtgagttcttttgtgattgggttacctcaagatccatccatttgcctaggaatttcataaattcattctttttcatagctgagtagtactccattgtgtagatgtaccacattttctatatccattcctctgttgaggggcatctgggttccttccagcttctggctattataaacaaggctgctatgaacatagtggagcatgtgtccttcttactgattggaacatcttctggatatatgcccaggagaggtattgcgggatcctcaggtagtactatgtccaattttctgaggaactgccagactgatttccagagtggttgtacaagcttgcaatcccaccaacaatggaggagtgttcctctttctccacatcctcgccagcatctgctgtcacctgaattttgatcttagccattctgactggtgtgaggtggaatctcagggttgttttgatttgcatttctctgatgattaaggatgttgaacattttttcaggtgcttctcagccatttggtattcctcaggtgagaattgtttagctctgagccccattttttttaatgtagttatttgattttctggagtccaccttcttgagttctttatatatattggatattagtcccctatctgatttaggataggtaaagatcctttcccaaactgttggtggcctttttgtcttattgagggtgtcttttgccttacagaagctttgcagtttcatgaggtcccatttgtcaattttttatcttacagcacaagccattgatgttctattcaggaattttccccctgtacccatatcttcgagggttttccctactttcttctctataagtttcagtgtctctggttttatgtggagttccttaatccacttagatttgaccttagtacaaggagataggaatggatcaattcgcattcttctacatgataaccgccagttgtgccagcaccatttgttgaaaatgccgtcttttttcccctggatggttttagctcccttgtcaaagatcaagtgaccataggtgtgtgggttcatttctgggtcttcaattctattccattggtctacttttctgtcactataccagtaccatgcagtttttatcacaattgctctgtagtgcatctcaaaatatttttaaaccatttaaagagatttagtaattctctttagtgtctattgtggatatatatatatatatatatatatatatatatatatacacaatatatgtatatgtatatatacacacacaatatatgtatatatatattagaaaatttatatatattatatatataatatatatattagaaattttaaatagaacaataatcaagccttgtccatatctttttgtttttttgtacattaaagtccttcaatagaaagtacatagtcagaggcacgactgtaatggtgtttagtttaacgatctctccataataaaaaaccaacttgtttataaatacctaagcatggctttgtttaatcctaaaagctatactgtgtttttctaagtcataggtctgttagtggattatcagaatacttcagtggtggaaacaccttgagtttatggctcaaagattcttatctttggtatgtgtttttcaactgtatactttatttaatgggttataaaatcaagttagtggagtacaactatcacttaaaactagaatggaataaaacttaaatatagttattctcatgaggcaaggctatatgaattacagtcttacttttaaaaagtatgtatttgtatgtgtgtatatatctgatcatgtgtgtgtatttttgtgtgtacatctgtgtgtaccagatcacaatgtaatatgtattttttcaagctactaatatctgtagtagtctcacctactgttatctaagtatattgtcattggagggttttaggatggtcatggcccatggttaagaggaaatttagcaaccacaatcaataaggattgaaaattaaactttcaaaatgtcatgtttggtgccttcccttattcttttttcttagtaatttgataagtaagcgtatttttctctaatcagtatttttcttcacacatgtgtagattctctctgatcaatacctgacacaggatgtgctggaaaagtccgatcatctgatggctgcagccaaaggtctgtttgctgatgttcctcgtaagcgcacaggtaagcgttcagtccacacacagcttgcatatctcccggaaacacagctcaggagagattagaggaattcactctgttatcaggagtcatgctcctgctgcatagtctagatggctagtatatgaagagccaagaatcataattcacttgctgtttataggagtattacaagtttctcaattaagggaactatctactaacatacagtgtaaagtacagcattttgtaaccgcaaaacatggctcaattttcagcttattaagttaccatataattaaaatatgtgcatttacttgtagtttgagtaagcctagcttaaaatctaaagcaacttcagtttcttgccaaaagaaactttgcttttctttagttacataggattatccctgccctccaccctcacaatccatgtagccgagactggctttgatctcctgatcgtccttcctcttaactccttagtgctggcattaaaggcgtatatcatcattctcggctccagcattattaatcataatggaatataacttgtttaatcttttagaaacatatgatttatttttagtgggacgtttgaatcccacatctcccatttactagcgtaactgggctaattacttaatttttccaagtttcagtttgctggcctgtaaaataataaaatctatctcatggagtttgtgaaggtaaaagtgagtttagatgtggctggtacatatccatgtaagtggagctgctgtttggaatttctctgaggtgaagggagcctgtggcagtatagaaatagtgaagcctcttcaagcagacgaaataaaatcgtgatgacttgtgtttgttcctctgcagggtttccaaatgtaacaagggctccagattcctcacagagccacactggaataaatcaagaccctgtcacccagtctatccttaatgaatcaatcatagagcctcaggtagtccattgcactcacaaccaagtgcccatgctgaaatgaagttcagcttgatacaggcatctcggaaaacattgtaaaagcttaaatgtcagccattgtcctgtcagctataaagagacagtagaaaaagaaactaacaaagattgggaaagatgagctagagaaaacatagaacatccaagaagataagatatgaagttgaaggatgagtgtaaacttcagtatttggtgtgtgtgtgtgtgtgtgtgtgcgcgcgcgcacaattggaagtcataggacaacctcaggaatactgtcccctcctttgagacagggtctctcattggtctggagttcacccactaagcctagcttgactggcaaggagcctccacagtgcagaagtgaaaagcatgcacccccattttattgtgtgttattgtgcgtgtgatttgggtactggattgaattccttgtgcatgtgccatccttctctaagctgttaggaagggaacaagggatgtgtaaggtgtaatgagggaaagaccaacttgtctgtggaagagtaagcaagctgaactcgaccttgtagaaagtatcttgagtggagtggcaggacacaagccaaattgcagaattggagatgaatctttaaagagattggtggagcccatagctttagaaaggctgagacagaagtagttgtgaatttggggccagcattagatacataatatattgggttagcatgggctaaacaaaaaaacataagacaaacaggagataatgtatcaaggtggggtaagaagaaacaggctctcttacactcaaatactgatagctgaagcaggcaagcagctgaagataattaggatagtagaagactgagagagtttggtagtttgcacacatgagggtgtcaacattaggaggagaaatgcctgttatgactagtgccctattatgggtgagtatataatcacttgtgctgttttactgttgaggtaggctcttaatgaagtcgacgatgcaggggagcagagcactgctcacagccagtcagaagacagcgagaatgaattgcctaactccctcagccagcattctaacaggagtacagagaggtacgtgtgtcccacgagtacacaggctcggccagtgttcccagagtattcaaagtgtgtgcttattgcattattccttaaaaataaaccagcaaaaaaagaaccagctgggtgtatagttttatctaaatgtttaaaattgttctataatgttttaaaagttgtagtaggagtgtaaaaaggtttttatttctcctgtacttctttctgtaagtaaagcagctatataaatatatatctcacttcctcttgtttcacacattaaaaatggcaatgctgtatttgaatttgtcaccagttatgacctagagtcagctcacagccttctgtaaggttttaggggtcacttgctttgtttttacagcacagtgaagtagctgggctgtaaactgagtgctagctgactggccactctcctggatacatgaccatttacattattgctagttctttgtagtaacaaaaacactatagtaaatatcttcatatttttatagtatttgaagtccatatttaagaaaaattattagaagtggaacttgaggtttaaagcataagcactgtacaattttgctttaaattgctgaattctattttatgaagaactttgaagttcatgcccagggtacagagcacttcccacattattttataggaaggcgccgttgcgtttgaggtctaatctcttacagttacagtttgtttttggtacacaggatgagatacgcacctatgcccttaaactattaggaaagacttcccttttgtcccattgtcacagcctccatctgagtgtggacttgctcttctagtgatgctggcctcttttctccagtctcctggagtgcaacagagttttgcttagagaggacttgtaggctttatagatacctatggcttttctttctttgttctgtttgtttgttttgagacaaggtttctctatgtagccctggctgttctagaacttgctatgtagaccaggttggccttgaatggcctacctctgcctcccaagtgctgtgattaaaggtgtgtgccaccatacccaccatatagcgtttcttaaaattttagggtgttcctaataattttaatctatttttatatgaaaattagtatcaatttgtttaacttcataaaacaaaacttactggtattttctgttatgatgcaatgtttcccctttgttaaaaagtgtgctttttgtttttgaggagtgctttgacatttttcttacatagtgtgtgctccttgctcagtttattcttaaatattgtttgtttctcgtttaatttctttgtcttccactatgtcttttatatctctgtgtccttaggctcctcttttgactcctgccccatttctggtgcaaaaccttttcttcaatatgagcaaactgtctgctgtacagacactggctctcctgaagggaagagaaactacaagggcagaaccatagataaataattactttagagagagaaagaagggtgagactatatatacaaaggcaaacactattgtgttagggaccatgggaccatagaaactggaaggcagatggactgttttctttcctaagatgatgggccttttggcttcttacccgtctgtattagcatcattcttttgctatgataaaagactcagacaaaagcagcctaaggaagagtgagtttattttggcttcaagttgcagaggggatgccatccactgtgacagggaaggcatggcccaggagcaggagcaggagcaggagcaggaggccagcctgtcacattgtattggcagtctggaagcacaacataggaggaggaagcggggcagggcgactaaaagccttaatctgtccccagtgacagacttactcttgcaaagtcacctttcataaaggttccacaatctttccaaacagctccaatagctggggactaaaatgtgaatatatacacctatgggagacatttatcattcaatctccacattgtcttgtcagataaagttggtaacattgttttttttttttttttaattgtgaatttctaaaaacttgtaaagcaaacacatgaacagttggacagtttaaatgatagcacctattaattctaattgtcccataatttataggtttcttcaccaactaaaggaagagaattccgagttaatcaatcaactgtggactgatattcagcagaaaatcgctacccagtcacaaagaactcctccaggatctccgtcctcggagctttcagccgaggatcagaaaggctagttcctcctttgctgtatttctagtagcagacttgcttaggtttgcttgtttgtctgttttgttgttgttgtttgttttgaacacaatagttttcaaacttaacttttggagtctctatatggtgattaaaatcctgatgactctattagtggaactgtttttagagaaagcttattctcttgaaatgctttctgctgtgttcttcctttccagctgctctgaatgcaacggatgctgtcaagagaatccaggctgggcctcagcctgaggaggctgctgagcctgtagacttcagctccagctacctgggacaggtgctaaacacaaggaagcaaaagccgctgctagctaaaggtgcacgcctcccactttacccagatgagttgttacacatgtcctttcagctgggccaactggctgtatttaagtatgagtctcatgaggggaagcaagaaacccctctgtcccacacagtgtgtcacagaatgttatgttagctatggataatgtaaacgtgtttcaaattttgtaggtttgtgttataaagatcgtggtaacttctttttaaaaactgtgaacaatcaaacctttttttggtaaatttgtacttgtgatcttcctggttttgacgtagaatgacttttgtcatcctcagtgaaaagaaaacaagatatgcatgctgcctccaagcagaagacaaacatgctgtcctccagcacagcctctgcagacagacccagtagcactggctccagcctggacgttctcaaacacgtgatccatgaagtggagcacgagatggaagagtatgagcggtgcacagggcgtgaggtcacggggctgcagggtggtcagggactcacaggcttcaccctgtccctggtgagctctctctgccgcctggttcggtaccttaaagaggtaagggtgcaagttatgggaatcctcttttcaggcaaaaatatatgtagattggtttctccttgcttaatttattgcaacctctaagtaaggacagttaaatttgaatatttttattttactcagttttagtatatctagtaaaatttatgcttgtagtcccccgctatcattagatatatggtgaggtaaatattgctgatgttgctatggataaagaaatatcttatgccagttgtaagtattactgtttgggtattttgggttaaatagcactgctagctatagctttgctatgtcgctttcctctgctggctgctgctcctgtgtcagctctgctggcagagttgctttgcctgtaatctgtaaatttcataggcaggaaaagtgtggtctctgtagaatgggagttgtcatcttattgtgaaaataattttatagaataaagaattgtttgctactaaataataatcggtccttaggtggtatagaattagtagttcattttaattttctataaggtctactaaaggatccgaggagatagctcagctgctcaagtgtttgctttgaaagcgtgtgtacttgagtttaatccccaaatcaaaaattctggggaagtgacgatggtggtctcctcggggctcctgagccagccagtctagccgaattggcaagctccactctaggtcagtgagagagagcccctgcctttatttctgagaatggcacttgaggtttccatgcatgcacaccctcatacacatgtacatgcagacattaaaacatctacatacaggttacttatgtgcttaaatatgttgaacaaatatgacaaaaatgttaagaaactttactttaagcagtagctgtgtcactgtggttgatgtgtcatctggggttgttttcgtcagagtgccttataatgagcggtttctgcgctgtcagacatgggaacgtcttttcagtagaccccttccactcctgttatcctcccacctcccaggattcttttccagtcagtctggagtccttgaaagtgtgctagtgcttaggaacaacagcaggcctatgacatgcgccttgtaactgttcacatactttcaaagctatgatagttcgtagagtagtcaatatagtacctgtttcaaagtatattttaacaatcaggttttgattggcggtatatcacacaacatgaaatagaagcatacagaagagtgtagagtggaaagcctaattctcattcctagcttgtaaccagcctgcttgtttccatgtagctcactgtcatggtcagacaccaatgagtcgttctagagacgggctttgtgttcaaactgtattcatgcacagcccttcactttttaaatgaaaaaaaaaagtagttctttaagatggaactagaacaaaaaaagtacgtttttatgaattaaatgtagccttctaatgaaagttttaagtctcatcgctgtcgtggttgttgcttctctgtaagtgtccttgctatcttgtctgtgtagaagtggagttgtcagtatgtgatcccactggtgggagtttacttttcttcttgtcttttgcagagtgaaatccaacttcggaaagaagtagagacaaggcagcagctggaacagatgttaggtgatcaccgagagctcattgatgccctgacagctgaaatcctctccctcagagaagagaatagtaccatgcaggtattcacttgccctcccaaaggctccatgtttgatagtgagcatgtctacgtgcatgtaagcgtctcctggagctgcgggtggcttagctgctctgatgtgactacctgtcacgtcggcagcagcagtgggtagtaatgagcgtttgttatgccagggttctgtagtcaaaacataagctgcatataatacataggataagtttgctatttctaagaaatatgctatggagtggggatagcaggatctacatttcaatacctaccaataccgtggtcatttaaagtgtgaaggagtgttctggtagccacttgtcattttagaggaaagggtattagaggaaaggatgacagcctttgaacccttctgcactggtattaggtactctttgtgattgcttttggtgactctataaaaaggcatacaatatctttcctagaacactgactgcttgcgtgcttctttaaatattctttctttgtatgcattatgtgactataggtattcatgtgtatgtacaagtctgtgtggaggacagaggttgatgttggtgtcagcctcagtcactcttcatcttactttttgaggttggggtccccatgaatgtgaagctcaccagtttgactggactctggccagtgagctctgagaatctacctgtctctgcccccacactgatgctataaacatgtgctgctgtacctagcattttacattagagctggggatttgaactcaggtccttatgtttgtgtggtgagcactgtactgactgagccatatccttacctccttaggactctttgcatgctgagtttaaagaattaggcaaaagaagtggggaaccaccgaaggcaagagtcatgatgtgacttaagtcttagaagggtcatctgagctactaagcatgcactgtgctctgctgtgctaatccacctgaagactacttcaccgcactgtgctgcgtgggccatagcagagagggctgcctttgttgggccacttagtgtcccctgactccggttctaaccacttaggagctgtttgacaataatatacctaattaatatttataaatacttaatatatatgtagaaatgaagagtcatatatttattttgttcttaaatgactacagttatttaccagtgaggtatgcgttcttttctgattctgtgtaactatccttagttatattggacatcattgtccttatttcttatcccacaatgtgtttctacccaaaacgtttttaaacatagctgcttccagaaaaccagccatcagaagattggatggctttttggttgtctttcttgttactgtttgagagtgggtctcactatgtatgtagcttaatgtggccttggctttgtggtcctcctgtctcaacttcttgcatgatagaaatgcagacgtgtgctgccatgctggcctaagaagatattaaactaccaaaaagaatataatgaaatcttattttcaaactgaattgcttccagctaatagatggctgatgctgcatagtcggtgtcttcactgctttctcttctcttgagaactgaagctgttctctggtggccctgtgaaatcactgtgttgtctcagactacaggttgaggacagaactagggatggtagcagagtacatctaggcgttgtgagattaattcaggtagggaatagcagcgtggccagagcagaagtgggaaatggtgtacagatggagcaaattcaaagtgtattgtgaaggccaaccaaacgcactggaaatggagcaaaggaaaggacgtgagggaaaaagccaaaggtaattgtgcagtttgggatttggatttaaaagatgaagctgccgtgtatgttgtaggaggcaagaggagcttggctttgtctaggttgagtttgaagtctatttgagtcctacatggggaaacttaaaagaccactgaacatacgagggtgaaacttgaggagaaagttgttttgtacgctgtattcattgatactacacattggtactctctctgacgtctggaccacacctacttttactcgttgtctgcatttataagcacttatggcatgtgtcaccagctgtgtcactggtttctcttgtctttgttataaggttttggcaggccatagaactttgctttcttccctttcacctgccatcttctatacctgtaaggactatatgccaatatttatgaaaggcctgcattttgtgattgtagtcagacttgttgattttacattacctatttacatctacagtatgaaacagataaagaaaaaaacaaatccatctaaacttctagacagtgaagttgacttttaatgtgagagtggaattccaaacatgttcagttatatgatagatgataagctaatcagttggtgtgatattgtctttattttgaattggaaaattctataacattagtaggtatatacacatccatagacaattctgagtatacattaactacagttactttcatagaaagctgtaattatcctacatagagaatgctgtgcttttcttttgctcttcacattgtttcacatacatgaagatatgtttttatgacattagagtttatccactttggtgtccatgaatgctctgttgagtttcccccacctaatgtatcactctnnnnnnnnnnnnnnnnnnnnnnnnnnnnnnnnnnnnnnnnnnnnnnnnnnnnnnnnnnnnnnnnnnnnnnnnnnnnnnnnnnnnnnaaaatgataacacacacacacacacacacacacacacacacactcactcacacacactcacatgtctgtatggcttactctttagataatgactgctgtttgttatgccagtgatgtgtggttttctttaggcgagacttcagcagtacatggttaccacagatgagcagctcatatcgctcacacatgccattaagaactgtcctgtgataaataactccagacaagaaagtcaagcaccagaaagggcagctatgggtagaagacttgtggataatgtaggtaggtggagtcttattattccccgtctgttatcaaattacctaatatctttagagtagtaataagcaaaaaagatcgagcttgtggattagaggaagtggtgggatggaatgtagtttgtatgaggtcactcttttctggtgggctttgctgttgatatctcatcactataatgttggtgagttaactttgctactaagaaacctttagttactcaaaggtgagaaacccagggcttatggtacttcacagttattgggaattattattgcctgtgggaaagttagaaatgttatagagatgaaaattggttcacatcttcctaagtctcacccttacaaccctgttagggtagcacagaatgcaccacactgttgacccataactcaccaagtgatcttgttgtggaatgatgcttgcatacagaagtcagtatattacagttttcttcttgtcttatttgtcatgaccattgggaagctagtgctgtgggtggtggggtctgctttctgaagatagctttgagtctttaacagcttttcctactgaaacgagttttctgcctctgagtttctggcaaaggagggtatagttgagagagtgaggaattttcctactacttaaatgcatttaagaataaatacctggaggctggagagatggctgcatggttaagaaaacttaaataatcctccataagacacaggttcagttcatggtacccctgtggtagctcataactcctgcctgtacagttccagggcatctgaaaccctcttccagcctttgtgagcttctaaaagcatgcagtgtacacacacacacagacacacacggacacataaagaattacatagaataaatacaggattttcacttgaatgtctcttctagctctctgacttagtagtttatacgctttgcatgggtctggggagttatttaagtgtgggcccatgtgtcctttctgttcctttcatgttaatgtcctcttatctttctcagagggtcctgttataagcagtaatggctccatgccattgatgttcagaggggaagaagtggttgaattcccacaggaagagttgcctgttaaactatctcaggggccaacccccacagaaaacttgaatctggccaataatttcccaacccatattttcgagccagctgtgatgctaacaccacccaggcagaagagcaactcagaattctctcctctccaggatggtaagcatgcttctcctatatttatatggaagctgtgattttttttttcctcttcacttatatgataatgtatatatgtgtgtatgttgtatgtgtgtgtgtgtatgtatatatgtaaagtgagttgtaatgtatgtgtacattacatacatacacgcacatgcacacacatgcattttttagggtagttcccctgcacccagccatcactctgaaagtaacaggataacttgaagaaggaaggacttgctttttgttcctgggttcggtggtctgtgaccagctagctctgctctttctgaatgctggtagaacaagatatggcagaggaaagcctctcacctcatggcagcccagagacagtgtgagaaggatctgaaaatgaacactcttcaaagacatgccactgctgaccaatgtgcacatgcgtgtgtgtgcgtgtgcgtgcgcatgcgcgtgcgtgtgcaaaggtccatgatacacatatggaggtcagagagaacttgtggtaatagatttgccttctaccacgtggttcctaggtatcaaatccaggtcatcaggcttagtggcaaggactttaacccacttaactctgtgtcactagtccttgaaaaatatttttaattatttttgtttatttgtgtgttggagggggggtgtgttccctcacccatgtgagcctgtgtggaggccaacagttgacaacattatattcctttatcactttccaccttttaaatttttgattaattaattttgagagagagagagaactaggcctgtggatgctgtggcttgtacaaggaggtcaaaggacatctctggggagtcagttctctcctgtgtggtgtcagactggaactccggcctgtgtgctagtgacttctgctgaggcagctttctagctcctcttttcaaagatagttttcacaggttggtcagcagcgcacgtctttgaaggatgtgcttttaaagatccttctctcttttttttttttttttttcatgagtgtacattttttgcatggattttttttctttaaaaattatagtagaagctaagttatatctttggaaccctaagttcctcagattgtctgtactttgatgtgttttcagtaaggaactgaggaggttgcagaggttaaagaaagtggcaaagccttgttactagaagtgcactttgctgtttctatggcaaattggtcattgtcagaccagctcaggggaagtggagatgatactgggctggagccacgtactggtggtttgcccactccttagtcacttggggggagtttcggactaagacgcctcttctctaactcagtagtttagtatttcttagaggtctggggagttattaattatgtctagaataaggaagtaagccttgaattgtgatgtttgtttatattagatttttaatccttatagtaattattcaatcccccccccacacacacacacatatacacacacactcgtgtctcactaggcagcccaggctggccttaaactcacgatcattccttctcaattgtgattacaggcatgcatcactgtttctgggtaggaggtacatatgtcaaagtatattaaaaacgattgtgacacatggtttttcagaatgctactaagtggtctcaggaatatgaaagtttttgtgcgtgattgtccatattcctttatgagactactttaggcactcggaggctaaacccttctattgcatatttcctatgacagcatgatgctgtgattatagcactgactgattaaaaaataagatgcatatgactgttttaaaattggtactcacagttctgaggaggactgttcagactcgtccggccccacgaattccccccactgtggaagttatagagaaggagcagaactgggaaaagaaggccctgcctattgatccagacattcagaactcaagtgaggaaaaccgtctcttcactcagaggtggagagtctcgcacatgggagaagacctggagaacaaagggcagccagcatttgttagcctgtcacagccgccttgtagttcccttcccagcactcagcagccaagaaaccccgtgttgtcagaggagcccactgtgcttggagatgggcagcagctcagaacatcggaggccctggtgcagaggaaggacattatggcccggatcgccgagctcacactgcagaattcagccatcaaggcccacctgaacaatattaccagctcagggggagagcaaggtgatggactgcgggagccacgcaaacagggaagtgccagtgaagtgtctactgtaagtaccagctgagactgcctgggacacagcaggagtgagatagggttggacactgtgagacctgtcactgcagtctaaaggggccgcaaagggaataaagatttgttttccctcatggtttcagggattactccctgtgtcagaatctattgctctggcccttaggttagacaaacagactttcatggtggccagaacacgtggtccgtaagggtcagaggataaggtacatgtctgtaagatgtgcccaggtgatgaaattcttctagctaagccctgcctcctcccagtcaccgcctacccataatactttcacgttatagatccttcattaaagccctcagaagccggtcactccctaaagcccaggggctggcaagcaagcccccagtgtatgagttgggacatttcatatcaggctttaacagacatccaaagaggtttcttctcagaagtgactctgaatagctttgacatatcttccttacaagtagatcaaacttacctgttagcttgttttacaacatgaaaatcaaaatacatgaacacatgaaaaaagaaaactaactaaactgtaggagggctgaggctaagctaggagtgaatgagatggagttgggaggacctagagcgcttgctgcacaactggattttaattaaaagtaatttactcttaatggggcctattaaagaagagttggcccttaactcttgaataactttttctagggcacagaatgagttttcctatagaaattacacttaaagaatnnnnnnnnnnnnnnnnnnnnnnnnnnnnnnnnnnnnnnnnnnnnnnnnnnnnnnnnnnnnnnnnnnnnnnnnnnnnnnnnnnnnnnnnnnnnnnnnnnnnnnnnnnnnnnnnnnnnnnnnnnnnnnnnnnnnnnnnnnnnnnnnnnnnnnnnnnnnnnnnnnnnnnnnnnnnnnnnnnnnnnnnnnnnnnnnnnnnnnnnnnnnnnnnnnnnnnnnnnnnnnnnnnnnnnnnnnnnnnnnnnnnnnnnnnnnnnnnnnnnnnnnnnnnnnnnnnnnnnnnnnnnnnnnnnnnnnnnnnnnnnnnnnnnnnnnnnnnnnnnnnnnnnnnnnnnnnnnnnnnnnnnnnnnnnnnnnnnnnnnnnnnnnnnnnnnnnnnnnnnnnnnnnnnnnnnnnnnnnnnnnnnnnnnnnnnnnnnnnnnnnnnnnnnnnnnnnnnnnnnnnnnnnnnnnnnnnnnnnnnnnnnnnnnnnnnnnnnnnnnnnnnnnnnnnnnnnnnnnnnnnnnnnnnnnnnnnnnnnnnnnnnnnnnnnnnnnnnnnnnnnnnnnnnnnnnnnnnnnnnnnnnnnnnnnnnnnnnnnnnnnnnnnnnnnnnnnnnnnnnnnnnnnnnnnnnnnnnnnnnnnnnnnnnnnnnnnnnnnnnnnnnnnnnnnnnnnnnnnnnnnnnnnnnnnnnnnnnnnnnnnnnnnnnnnnnnnnnnnnnnnnnnnnnnnnnnnnnnnnnnnnnnnnnnnnnnnnnnnnnnnnnnnnnnnnnnnnnnnnnnnnnnnnnnnnnnnnnnnnnnnnnnnnnnnnnnnnnnnnnnnnnnnnnnnnnnnnnnnnnnnnnnnnnnnnnnnnnnnnnnnnnnnnnnnnnnnnnnnnnnnnnnnnnnnnnnnnnnnnnnnnnnnnnnnnnnnnnnnnnnnnnnnnnnnnnnnnnnnnnnnnnnnnnnnnnnnnnnnnnnnnnnnnnnnnnnnnnnnnnnnnnnnnnnnnnnnnnnnnnnnnnnnnnnnnnnnnnnnnnnnnnnnnnnnnnnnnnnnnnnnnnnnnnnnnnnnnnnnnnnnnnnnnnnnnnnnnnnnnnnnnnnnnnnnnnnnnnnnnnnnnnnnnnnnnnnnnnnnnnnnnnnnnnnnnnnnnnnnnnnnnnnnnnnnnnnnnnnnnnnnnnnnnnnnnnnnnnnnnnnnnnnnnnnnnnnnnnnnnnnnnnnnnnnnnnnnnnnnnnnnnnnnnnnnnnnnnnnnnnnnnnnnnnnnnnnnnnnnnnnnnnnnnnnnnnnnnnnnnnnnnnnnnnnnnnnnnnnnnnnnnnnnnnnnnnnnnnnnnnnnnnnnnnnnnnnnnnnnnnnnnnnnnnnnnnnnnnnnnnnnnnnnnnnnnnnnnnnnnnnnnnnnnnnnnnnnnnnnnnnnnnnnnnnnnnnnnnnnnnnnnnnnnnnnnnnnnnnnnnnnnnnnnnnnnnnnnnnnnnnnnnnnnnnnnnnnnnnnnnnnnnnnnnnnnnnnnnnnnnnnnnnnnnnnnnnnnnnnnnnnnnnnnnnnnnnnnnnnnnnnnnnnnnnnnnnnnnnnnnnnnnnnnnnnnnnnnnnnnnnnnnnnnnnnnnnnnnnnnnnnnnnnnnnnnnnnnnnnnnnnnnnnnnnnnnnnnnnnnnnnnnnnnnnnnnnnnnnnnnnnnnnnnnnnnnnnnnnnnnnnnnnnnnnnnnnnnnnnnnnnnnnnnnnnnnnnnnnnnnnnnnnnnnnnnnnnnnnnnnnnnnnnnnnnnnnnnnnnnnnnnnnnnnnnnnnnnnnnnnnnnnnnnnnnnnnnnnnnnnnnnnnnnnnnnnnnnnnnnnnnnnnnnnnnnnnnnnnnnnnnnnnnnnnnnnnnnnnnnnnnnnnnnnnnnnnnnccccccctccccctccccctccctccctctttcagctgaggcaagtagtaggagctgcaggcgccgggcggcttcgttcatgcagcagtggaaaaatttgtgtatgcctttgctttagccctcatgcttcaattacatgatttgtaaactattttaccccatcattcatttatgtttatatcaaggctcataaatactgaattgctggtacttagtagaaaaatcagagttgagtggttttaatgatggatttatacctttccccctaaagaatttcccagcagttcagtctttaacgccaagtagcatggaggagcggattgcagagttgaaccgacagagcatggaggcgcgcagcaaactgctccagctgatagagcagcagaaacttgtgggcttgaacctttcctcatcaccggtgtcacccgtggagtcacctctcagagcgtgggccggtaggtcacagtgtgattcctgacttacaaatgtagaagtgtggtttcactctcccaactgtgaaagttcctgctgagtcaacataacctcacggcattccatgtcctagtcccccagttctgtgccacaggacgctggcttggggcagagagtaagtggcttggcagaaatagtggtagaaagctgcctcttaggtggatttctgagttcaaggccagcttggtctacagagtaagttccatccaggacagccagggctacacagagaaaccctgtatccaaaaaaaaaaaaaaaaaaatgcaagcaagcaagcaaacaagcaaagctgcctcttgttctatagttagtctctggcatctagggagacaccatcgaagtcacatacagtatgtgactcgcttaggatatatgctgcataaagtatctataaatgttatcacatcagattacaaataattgctctcttaaaaccaggagcatatttccactcaattgagtttttacattattttgttacatttaagaatatataaagaaattaaaaaataattgagttttcatagtagtcctgttcaaacagtgctgaataaatgaagtagctcaaagttgcttttagccaaaaatacatttatgccctcaagggtggtgctacatcaaagatattgattggatcccagtctaaagctaattgtgacgaactgaaaggcattcctgagatgctaaagctatggtgcttacagggacccaccttagtgtcctgcatgactgggttaccactaagagttttcacctctgttggaaattatttattttttgaaaatttgaacaagagactcttggggatttctagaaagtaacaggtaatttattttccctaaagcctttcctttgtatttattctaggtttcctcagttgaccaatagctgtcttcagttcttcatagtcatgaaggctggaggcaaattctggctcaaatacgtaaattgttcacatatgaatcctgcaaggtgcctgccatgtgtggtcttaaatattccagcaccaaactggggaccacacagaaacaataagtgtagaaaatgtcagctggttctgagaatagttggggacataaagcaaaacagcctaacgtgtgattctgtgaatgtgacattgctttctgtaagcttgaaaattatctttatttctgctatctcatctagtattcaacacacccaaaatagaattcttgattttatagtcacctctgtggggtataataaaaattagagtaaacagtgtcatggttttgtagtataactgggggaatttaaaaaaattagttagctttgttgtttgacaattttatacgtgaataatacattctggctcttctcaccctcagtctgctattctctcttctcttacagccccctgcctttctctcttctcctacagccctggcagccccctgcctactgtccctttctcatgctgataacttgttttccctccagctattacatttgttctaccctcttccaaggttttctctgagccttgaaggaggagctatagaggtccttttgagaggtactttactggctcttattctcagcactgtgagcagccaagagtctgtattcaccacagttttctgccgagccaagctgctctgaataaggctgagagtggcattttttttctgtggctgtaaagagagatacttagaaggcagcttgacataacagtttagccagacaaccgtagtaactctcttctactcgggacctacgaccttccctgccgtgtggttttgatcagatatattgtaccatggacttggatatggccaaagcaaagcctaattatgtgaatcttcagggtttcctaagtagataaacagtcaatagacatttattagtaaaatactttatagccatcataatcatagaggatcccgcaagtcattcttaagatcagacttcatagctgtaagggtaaaagaaaccctatttagttttatcaaattcaaaaattaaactttacggctagctctcttttaattaaaaaaaaaattttattctgtgacaatttcacaaatgcatgtattttaactatattcaccccccccccatacacacatacacaccccttctcttcatcctctttcctgttccccaatgtatcgtagggcccactggttgtcactgcttgctctgatatgataccacttgttggaagattctggcattctgtaaactggcatgctgcccaattgacaagtagctaaagtttcctgttgtaacagttcattttttaaaaaccatctctcaagtgcttctgtaagccatcatgacaaaactatataaacacctaaaattgtaacaaataatttctaataatgttgaaatttaacaaagatattacttctcttagtgagaagtaaggacattaaattttacttttatattttagaagaaggaaagcgaaccatcgaggtgtctgttccaggaatggaggcttcagagagttcaaaatgcaatactgtgtctcctgtcagtgggaacagttcaagaaggtagggccacagggctgttggtactcaaagcatcaagagtatctgtgtgcctttctctctgcactaggtttctttttaacttaagttcagacagactcactcatacagagagaataaggtgagaagtaagcttgaccgagtagggttgtctgcttaaaacagaaatgggctgatctttatgcatttatggctacaaaattaggagatgctatctcccagggtagatacattgactggtagcactttcatccttgcaataagtgaacacaaagctgattggcctagatgagccacgtgattggtaggcgagtcaggaaggagttccctggctttcctgtctccaccctgcatccttgtatctaccgttctgctccagttctcatcgctcccaggctaccctgaccaccttcccactcctgcacagcctttaaaagtcgtacctgtatggtattatttatggaaggcatgtgcagttatctgtcaaaatctgcagaatgtatctcatacagagagaccccagtggaaactggactttgttagtagtgagtcaggcttgggtggtcagtggtgatgtattaattcaggatgttataaataagagaagcagtattagagatggaggtgacaggcacatgagaatgccgaaccttcactctttctataaagctaaactacgctgagagtaaactattagttttaagctttgtgttggtcaagtgtaacgacccgttttggacctgtcagccaaaccctttccaggtcttcccagtaaagagagcagttgcacgatcgatggctcgtggtaaatctccccctctgactgcctgcttatttctccttgatagatcgtcaggggcgatcagcaattcttgttctccactaaacgccacctcaggaagtgggaagttcacaccagttaatccaagaacaaaggtatgttataaaatattatcagtgtactatgtagggttgagagagtgcaggtggaagatgactaacgtccattactattcttagtgtctttaacatgatagaaactgtgcaaggaaaagaaagactataatttatcttcatttgaaaaacaagtcatttgtttgtcttgtatggtaactaagagataagctagaatttggtaggatttcaagtgtcttccttcagagactaggagttaactagtttcaggattgattcccaagtcttgagtgggtcatagatttgaggtattgctcctgccattgttggggtgactaagtagagtttgggatagccagtcctgggtctgggtacttacaccagtgtaccacagctgagggtaccttttttagatgggtgataacaccgagggcaaatgaatgctttgtatgctttcataagttctggtttggtccagactgtttggaagctaaacatttacaatttatgtagatcttttcacaggaggcatttttatttgttttgataatgttgaaaattcagtgtttatcatagaagattaaaaaaatgtctttagaattgtaaaagttgtttctccagaggtaaactgctaagagatatggaaggcattggatcatagagatcgacacagcccaaatgcaccaactgccttagttagttagctgccccagttgcctggctttacaattttgtcctttctgattttacattctgaaaagcttaaagttatctctttgatacagttatccatggttcatggaacttggtatcatttaatttgccaagatccagtaactttatttttttcatcatgtttcaaattgtatctacagttgaataaatgttggatttctccttctgaaagttaggtttttactaggacacctgctgaacaggcaaccagctgtctggtgtcttcgtgggcaggagctttgccagtagagctgacacttcaaagccatttaacacatgcgactttgttgaatgtactcggtttaaatgtctctgagtctctagtgggctcatgtctaactcctctctgcatctttgttcaacagactgaaaaaaaaaatgaagaaggttggtttgctctctctgcccacataccgtaagtgaagccccagcagagagtgtcctcagtgacttattcctggcctttccttcgcacttcacagattccatttcaagttaataacatttttcttcagataaaacctgcataggtatcctgtatttatggaaacagaaaaaagaattattttaatattttaccttttcaaatgttttttcaacaaagcacctctaattccctgtgagtaaagctttgcaggagtttaagttttatatttgtttagccttgttaaatgcattagtgatacattgttacttttgtcattttggttgaatgtttgtttgttatttagtgcatcttaaatgcaatcaccttcccacaagaactaattggctttatgtataacttaaaataaagttgttctggctttcagaaaaa

SEQ ID NO: 332 - DNA, 3217 bp, Mus musculus
cagggtcagttttagttcccggtgaacctagcgcgtttggctccactgggaggtagcaagacatatttctaagcaaacgatcaaaagttaaggcaaggaagtgcggtatgtggaggttggtgtgcaagtttcttttggagacttctagaggcttatgacaggcgcgccatttggccctttgggtgagaactgcagagccccacgccagtaccgcctctgggtcgcctcggaggagctcgccggatgtacgcaaaggcgtgggggcggagctctggtaacccaggcaacggcccggaagccactttccgcgttcccccgtggcgggctctgtggttctggaggctgaacttttagtcggggcggaggcacagtcggccagcggcaaggtgcgccgtcatgagatgcacaagtcaaagaatagagcattggtgcactgggaacttcaagaaaaagctttgaagagaaaatggaagaagcagaaaccagaaacttcaagtcttgaaaaaagaaagttatctatcatgaaggagattctctctgatcaatacctgacacaggatgtgctggaaaagtccgatcatctgatggctgcagccaaaggtctgtttgctgatgttcctcgtaagcgcacagggtttccaaatgtaacaagggctccagattcctcacagagccacactggaataaatcaagaccctgtcacccagtctatccttaatgaatcaatcatagagcctcaggctcttaatgaagtcgacgatgcaggggagcagagcactgctcacagccagtcagaagacagcgagaatgaattgcctaactccctcagccagcattctaacaggagtacagagaggtttcttcaccaactaaaggaagagaattccgagttaatcaatcaactgtggactgatattcagcagaaaatcgctacccagtcacaaagaactcctccaggatctccgtcctcggagctttcagccgaggatcagaaagctgctctgaatgcaacggatgctgtcaagagaatccaggctgggcctcagcctgaggaggctgctgagcctgtagacttcagctccagctacctgggacaggtgctaaacacaaggaagcaaaagccgctgctagctaaagtgaaaagaaaacaagatatgcatgctgcctccaagcagaagacaaacatgctgtcctccagcacagcctctgcagacagacccagtagcactggctccagcctggacgttctcaaacacgtgatccatgaagtggagcacgagatggaagagtatgagcggtgcacagggcgtgaggtcacggggctgcagggtggtcagggactcacaggcttcaccctgtccctggtgagctctctctgccgcctggttcggtaccttaaagagagtgaaatccaacttcggaaagaagtagagacaaggcagcagctggaacagatgttaggtgatcaccgagagctcattgatgccctgacagctgaaatcctctccctcagagaagagaatagtaccatgcaggcgagacttcagcagtacatggttaccacagatgagcagctcatatcgctcacacatgccattaagaactgtcctgtgataaataactccagacaagaaagtcaagcaccagaaagggcagctatgggtagaagacttgtggataatgtagagggtcctgttataagcagtaatggctccatgccattgatgttcagaggggaagaagtggttgaattcccacaggaagagttgcctgttaaactatctcaggggccaacccccacagaaaacttgaatctggccaataatttcccaacccatattttcgagccagctgtgatgctaacaccacccaggcagaagagcaactcagaattctctcctctccaggatgttctgaggaggactgttcagactcgtccggccccacgaattccccccactgtggaagttatagagaaggagcagaactgggaaaagaaggccctgcctattgatccagacattcagaactcaagtgaggaaaaccgtctcttcactcagaggtggagagtctcgcacatgggagaagacctggagaacaaagggcagccagcatttgttagcctgtcacagccgccttgtagttcccttcccagcactcagcagccaagaaaccccgtgttgtcagaggagcccactgtgcttggagatgggcagcagctcagaacatcggaggccctggtgcagaggaaggacattatggcccggatcgccgagctcacactgcagaattcagccatcaaggcccacctgaacaatattaccagctcagggggagagcaaggtgatggactgcgggagccacgcaaacagggaagtgccagtgaagtgtctactaatttcccagcagttcagtctttaacgccaagtagcatggaggagcggattgcagagttgaaccgacagagcatggaggcgcgcagcaaactgctccagctgatagagcagcagaaacttgtgggcttgaacctttcctcatcaccggtgtcacccgtggagtcacctctcagagcgtgggccgaagaaggaaagcgaaccatcgaggtgtctgttccaggaatggaggcttcagagagttcaaaatgcaatactgtgtctcctgtcagtgggaacagttcaagaagatcgtcaggggcgatcagcaattcttgttctccactaaacgccacctcaggaagtgggaagttcacaccagttaatccaagaacaaagactgaaaaaaaaaatgaagaaggttggtttgctctctctgcccacataccgtaagtgaagccccagcagagagtgtcctcagtgacttattcctggcctttccttcgcacttcacagattccatttcaagttaataacatttttcttcagataaaacctgcataggtatcctgtatttatggaaacagaaaaaagaattattttaatattttaccttttcaaatgttttttcaacaaagcacctctaattccctgtgagtaaagctttgcaggagtttaagttttatatttgtttagccttgttaaatgcattagtgatacattgttacttttgtcattttggttgaatgtttgtttgttatttagtgcatcttaaatgcaatcaccttcccacaagaactaattggctttatgtataacttaaaataaagttgttctggctttca

SEQ ID NO: 333 - protein, 803 aa, Mus musculus
MHKSKNRALVHWELQEKALKRKWKKQKPETSSLEKRKLSIMKEILSDQYLTQDVLEKSDHLMAAAKGLFADVPRKRTGFPNVTRAPDSSQSHTGINQDPVTQSILNESIIEPQALNEVDDAGEQSTAHSQSEDSENELPNSLSQHSNRSTERFLHQLKEENSELINQLWTDIQQKIATQSQRTPPGSPSSELSAEDQKAALNATDAVKRIQAGPQPEEAAEPVDFSSSYLGQVLNTRKQKPLLAKVKRKQDMHAASKQKTNMLSSSTASADRPSSTGSSLDVLKHVIHEVEHEMEEYERCTGREVTGLQGGQGLTGFTLSLVSSLCRLVRYLKESEIQLRKEVETRQQLEQMLGDHRELIDALTAEILSLREENSTMQARLQQYMVTTDEQLISLTHAIKNCPVINNSRQESQAPERAAMGRRLVDNVEGPVISSNGSMPLMFRGEEVVEFPQEELPVKLSQGPTPTENLNLANNFPTHIFEPAVMLTPPRQKSNSEFSPLQDVLRRTVQWAPRIPPTVEVIEKEQNWEKKALPIDPDIQNSSEENRLFTQRWRVSHMGEDLENKGQPAFVSLSQPPCSSLPSTQQPRNPVLSEEPTVLGDGQQLRTSEALVQRKDIMARIAELTLQNSAIKAHLNNITSSGGEQGDGLREPRKQGSASEVSTNFPAVQSLTPSSMEERIAELNRQSMEARSKLLQLIEQQKLVQLSSSPVSPVESPLRAWAEEGKRTIEVSVPGMEASESSKCNTVSPVSGNSSRRSSGAISNSCSPLNATSGSGKFTPVNPRTKTEKKNEEGWFALSAHIP

SEQ ID NO: 334 - DNA, 3367 bp, Mus musculus
cagggtcagttttagttcccggtgaacctagcgcgtttggctccactgggaggtagcaagacatatttctaagcaaacgatcaaaagttaaggcaaggaagtgcggtatgtggaggttggtgtgcaagtttcttttggagacttctagaggcttatgacaggcgcgccatttggccctttgggtgagaactgcagagccccacgccagtaccgcctctgggtcgcctcggaggagctcgccggatgtacgcaaaggcgtgggggcggagctctggtaacccaggcaacggcccggaagccactttccgcgttcccccgtggcgggctctgtggttctggaggctgaacttttagtcggggcggaggcacagtcggccagcggcaagatgtcattgatcagagtgaaccgctttggtccccggggaggtggaagaaaaactctgaaagtaaagaagaaagctgcagtgaggcaagaatgggataatactgtgaatgatctaacagttcaccgggcaactcctgaagatctagtgcgccgtcatgagatgcacaagtcaaagaatagagcattggtgcactgggaacttcaagaaaaagctttgaagagaaaatggaagaagcagaaaccagaaacttcaagtcttgaaaaaagaaagttatctatcatgaaggagattctctctgatcaatacctgacacaggatgtgctggaaaagtccgatcatctgatggctgcagccaaaggtctgtttgctgatgttcctcgtaagcgcacagggtttccaaatgtaacaagggctccagattcctcacagagccacactggaataaatcaagaccctgtcacccagtctatccttaatgaatcaatcatagagcctcaggctcttaatgaagtcgacgatgcaggggagcagagcactgctcacagccagtcagaagacagcgagaatgaattgcctaactccctcagccagcattctaacaggagtacagagaggtttcttcaccaactaaaggaagagaattccgagttaatcaatcaactgtggactgatattcagcagaaaatcgctacccagtcacaaagaactcctccaggatctccgtcctcggagctttcagccgaggatcagaaagctgctctgaatgcaacggatgctgtcaagagaatccaggctgggcctcagcctgaggaggctgctgagcctgtagacttcagctccagctacctgggacaggtgctaaacacaaggaagcaaaagccgctgctagctaaagtgaaaagaaaacaagatatgcatgctgcctccaagcagaagacaaacatgctgtcctccagcacagcctctgcagacagacccagtagcactggctccagcctggacgttctcaaacacgtgatccatgaagtggagcacgagatggaagagtatgagcggtgcacagggcgtgaggtcacggggctgcagggtggtcagggactcacaggcttcaccctgtccctggtgagctctctctgccgcctggttcggtaccttaaagagagtgaaatccaacttcggaaagaagtagagacaaggcagcagctggaacagatgttaggtgatcaccgagagctcattgatgccctgacagctgaaatcctctccctcagagaagagaatagtaccatgcaggcgagacttcagcagtacatggttaccacagatgagcagctcatatcgctcacacatgccattaagaactgtcctgtgataaataactccagacaagaaagtcaagcaccagaaagggcagctatgggtagaagacttgtggataatgtagagggtcctgttataagcagtaatggctccatgccattgatgttcagaggggaagaagtggttgaattcccacaggaagagttgcctgttaaactatctcaggggccaacccccacagaaaacttgaatctggccaataatttcccaacccatattttcgagccagctgtgatgctaacaccacccaggcagaagagcaactcagaattctctcctctccaggatgttctgaggaggactgttcagactcgtccggccccacgaattccccccactgtggaagttatagagaaggagcagaactgggaaaagaaggccctgcctattgatccagacattcagaactcaagtgaggaaaaccgtctcttcactcagaggtggagagtctcgcacatgggagaagacctggagaacaaagggcagccagcatttgttagcctgtcacagccgccttgtagttcccttcccagcactcagcagccaagaaaccccgtgttgtcagaggagcccactgtgcttggagatgggcagcagctcagaacatcggaggccctggtgcagaggaaggacattatggcccggatcgccgagctcacactgcagaattcagccatcaaggcccacctgaacaatattaccagctcagggggagagcaaggtgatggactgcgggagccacgcaaacagggaagtgccagtgaagtgtctactaatttcccagcagttcagtctttaacgccaagtagcatggaggagcggattgcagagttgaaccgacagagcatggaggcgcgcagcaaactgctccagctgatagagcagcagaaacttgtgggcttgaacctttcctcatcaccggtgtcacccgtggagtcacctctcagagcgtgggccgaagaaggaaagcgaaccatcgaggtgtctgttccaggaatggaggcttcagagagttcaaaatgcaatactgtgtctcctgtcagtgggaacagttcaagaagatcgtcaggggcgatcagcaattcttgttctccactaaacgccacctcaggaagtgggaagttcacaccagttaatccaagaacaaagactgaaaaaaaaaatgaagaaggttggtttgctctctctgcccacataccgtaagtgaagccccagcagagagtgtcctcagtgacttattcctggcctttccttcgcacttcacagattccatttcaagttaataacatttttcttcagataaaacctgcataggtatcctgtatttatggaaacagaaaaaagaattattttaatattttaccttttcaaatgttttttcaacaaagcacctctaattccctgtgagtaaagctttgcaggagtttaagttttatatttgtttagccttgttaaatgcattagtgatacattgttacttttgtcattttggttgaatgtttgtttgttatttagtgcatcttaaatgcaatcaccttcccacaagaactaattggctttatgtataacttaaaataaagttgttctggctttcagaaaaa

SEQ ID NO: 335 - protein, 856 aa, Mus musculus
MSLIRVNRFGPRGGGRKTLKVKKKAAVRQEWDNTVNDLTVHRATPEDLVRRHEMHKSKNRALVHWELQEKALKRKWKKQKPETSSLEKRKLSIMKEILSDQYLTQDVLEKSDHLMAAAKGLFADVPRKRTGFPNVTRAPDSSQSHTGINQDPVTQSILNESIIEPQALNEVDDAGEQSTAHSQSEDSENELPNSLSQHSNRSTERFLHQLKEENSELINQLWTDIQQKIATQSQRTPPGSPSSELSAEDQKAALNATDAVKRIQAGPQPEEAAEPVDFSSSYLGQVLNTRKQKPLLAKVKRKQDMHAASKQKTNMLSSSTASADRPSSTGSSLDVLKHVIHEVEHEMEEYERCTGREVTGLQGGQGLTGFTLSLVSSLCRLVRYLKESEIQLRKEVETRQQLEQMLGDHRELIDALTAEILSLREENSTMQARLQQYMVTTDEQLISLTHAIKNCPVINNSRQESQAPERAAMGRRLVDNVEGPVISSNGSMPLMFRGEEVVEFPQEELPVKLSQGPTPTENLNLANNFPTHIFEPAVMLTPPRQKSNSEFSPLQDVLRRTVQWAPRIPPTVEVIEKEQNWEKKALPIDPDIQNSSEENRLFTQRWRVSHMGEDLENKGQPAFVSLSQPPCSSLPSTQQPRNPVLSEEPTVLGDGQQLRTSEALVQRKDIMARIAELTLQNSAIKAHLNNITSSGGEQGDGLREPRKQGSASEVSTNFPAVQSLTPSSMEERIAELNRQSMEARSKLLQLIEQQKLVQLSSSPVSPVESPLRAWAEEGKRTIEVSVPGMEASESSKCNTVSPVSGNSSRRSSGAISNSCSPLNATSGSGKFTPVNPRTKTEKKNEEGWFALSAHIP

SEQ ID NO: 336 - DNA, 70509 bp, Homo sapiens
cctgtggcgcgctccgcggttccggcgcctgaagttttagctgcggtggcggcggcagtcgggaccgactgcaaggcaggttgagatgatggatctgaggcttgcagctcgcagtcccaacgagccttagggaccagggctaccaaaagggtggggagaacggtggtggcatctgtctgttgcctgggatccaggcgcccggttggggaatccttacttcaggaagcgcagccgcggctctgtgttttgagagtgcaagtacgtgtcagggtgcgtgtctgggtatgtttgtgcgtggcgccagagcacctcgagtatgcgcgtgcgcaccgctttcgggagcttttgcacagagctggtaattgggggtgctcgattgtagcgttgggggagttcaccgtgtagcaggagagaggcaaactatccagggtgctttgggaccgggagcgtcatttaaatcgatggatgtcagaggggcttctcagaaggctcctcctgtgagttttgaggagtccgtggaagttaacccagtagagaagagagtgagcctaatgagtgttccaagcagagggaaaagaatggttgcaactgtgtgtgaggcgagagcttggttttaggatttgcgggagatgtgagagaacactggaaagaaaagtcagccgggccatatgggggagagggtctgaatgccaagctgagttggattgcttttgacagtggggagccatccgaatctagaggaagtaggtaaagggttcagatctattctctatccatgtatttaggtaggattgattcaacagtgtttggaaagagttcttgtttctctttgatcagttttccacaccagtcagagtggatttactaagtccagtcataactatcccttttaaaattcttcagtggtttcctatggtcttaggtgttcagattgctgtggctcacaagactacaatctgctgtctgcctttcttcctttaacctctcaccctctcagatctttgttaattgaactgaacttctcaaactcttcgtaaatgcattttcccttgcctggaatattctttcccctgcttctaacttttattcgtattttagctctcagtgcaaacatttttgggggtattacagagaggagaagcttttacttactgcatagagttagttaggtactttcatggcacacagaatttacttcccatgctgcccttttgttgtaaatacttgtttaattgcggtcctcttagaaactcttaactctgcaagggcatagactattctactttcttgttatatctggtgcctcgcttttagatggtgcttcaaaatattagttacattaatagatggatgatgaagtcagtgagtgaagagtgaaagggagactaattagaataatgagagcctgaacaaaaatatttttagtagagatggagaagagcgggcaagagagatttttagggaaaaagttaatagattctgttatctgattcactaagagataaggaacagaggtgatgctgaggttttaaattggagcaactaggattgtaattctgtaaattcagcttaattgaacatatttatcgagtcaaccagttatatatcagcaagtagagatttggggtatgatgatgagctgtattttgatatactgtatttgtgatatttgggagatgtatatagtaggtagttagaaatgagcatttggtgtttttgttttgtttttgtttgtttattttaagagacagagcctcactttgtcacctaggctggagtgcaggggcgccatcgtagctcactgcagcctccaattcctgggctcaagcagtcctcccacctcagcctcctgagtagctgaaactataggcactcactgccactcctggctaattaaaaaaaattttttttttagagacagggtcttgctatgttgcacaggctggtcttgagcttcctgcctcaagcgatcctccagcctcagcctcccgagttgctgggattacagatgcgagccactgtgtttgaagttttgaggaaaggtgtgaatcattgatttgggactcattttcacagtgtgtttgtttgtccatacattcatagctttgctcaagggagttggtgaggtcactgagggaggatgtgaactgcccctttgtgatcaagaaagcagctccatgagagctggcaccatattagacttgtttactaatatcttagtttatttagtttacttagtttacttgtttacttgtatctctaatgcctagccagtgcctggtgtgtgctgcactcccccaaataattattgaatgaaaggagagggtatctaatggaaagacaagaagaatgagaactgagatagaactgggtggaaatccttgattaaattgtttgtgtggaggaggacaatagagcctgtgaagaaaaggagaaaagaatagaagaggccaggtgtggtggctcacgcctgtaatcccagcactttgggaggccaaggcaggtagatcacgagatcaggagttcgagaccagcctgaccaacatggtgaaaccccgtttctactaaaaatacaaaagttagccgggcatggtggcaagcgcctgtaatcccagctattcaggaggctgagggaggagaatcgcttgaacccgggaggtggaggttgcagtgagctgaggtcgtgccactgcactccagcctggtaacagagcaagactccgtctcaaaaaaaaaaaaaaaaaaaaaagaaagcttttcagtgcaaaggtggggtcagagtttttgtaattaataaaacttggaggtagaactaaggattagtaaatacaggtgctaaagtgtaccttttcatgaagctggatggcaagagaagggcaaagatgggatagcagcttaactatacctgtgttatcctactgtacacaggtagtaaattaccacagatttagtggcctaaaacaattactatttatcatttcacaatttctgtgggttgtgagtttggacatggcttagttagattctttgcttagggtcttccaaagctgtaatcaagtcgttggccagtatgcattctcatctggagttttagcttctgaataagtaaaatattctaaatgtaacttgaaatacttttccccccatttttaagagtaacataggtccattatagaaaatttgggaaatataaaagcaaacagaggtaacccaattctggcaaagttttccagcatgtgctttacagtcagtcagacctggtcttgagtgtcagctcttggctctgcctgttattatttgtataactttgagctatatactttctctaagcctcatttttcattttttttgaattttaatattcttaatatttttaaattttgtttcaagttctagggtacacgtgcggtatgtgcaggtttgtttcataggtaaacgtgtgccatagtggtttgctgcatctatcaacccatcacctaggtattaaatctagcgtgcattagctatttttcctgatgctctgtctccctgcatccccctgccatctgacaggccccagtgtgtgttgctcccctccctgtgtccatgtgttctcattgttcagcacccacttataagtgagtacatgtggtgtttgattttctgttcctgcattcgtttgccaagtgtaatggcttccagttccatccatgcccctgcaaaggacatgatctcattcctttttatggctttatagtattccatggtttatatgtaccacatttctttattcagtctatcaatgatgggcatttgggttgattccatctctttgctattgtgaatagtgctgcagtgaacatatatgtgtgtgtatctttataattgaatgatttattttcctttgggtatatatgcagaaatgtgattgctgggtcaaatggtatttctggttctaggtctttgaggaatcgccacactgtcttccacaatggttgaactaatttgcatttccaccaacagtgtaaaattgttcctatttctccacagtcttgccagcatgtgttgtttcttgactttttaataatcgccattctgactggcatgagatggtatctcactgtagttttgatttgcatttctctaacgatcagtgatgttgactttttttcatacgtttgttggctgcataaatgtcttcttttgagaagtttgtgttcatgtcctttgcccacttattaatggggttgtttgtttttttgtcaatttaagttccttgtagactctggatattagccctttgtcagatggagagattgcaaaatttttctctcattttgtaggttgtctgtttgctctgatgataatttcttttgctgtgcagaagctctttagtttaattggattccatttgttaagttttgctttcgttacaattgcttttgacattttcatcatgaaatctttgcctgtgtgtatgtgctgaatggtattgcttagattttcttctagggtttttatagttttgggttttacatttaagcctttaattatcctgagttgatttttgtctatggtgtaaggaaggggtcccgtttcaattttctgcatatggctcaccagttctcccaacactattaagtagggaatcctttccccattgcttgtttttgtcaggtttgttgatgatcagatggttgtagatgtgcagtcttatttttgagttctccattctgttccgttggtctatatgtctgcttttgtagcagtaccatgctgttttggttactgtagccttgtagtatagtttgaagtagggtagcatgatgcctccaactttgttctttttgtttaggattgtcttggccatatgggctcttttttggttccatatgaattttaaaatagttttttctaattctgtgaagatgttaatggtagtttaataggcatagtattgaatctataaattacttaaaaatgccagtatggctattttcactgtattgattcttccagtctcatttttcttatttgggaaaagggttaattgttgtcactgacatcattatcctcaacatttaaatacaattttgtatgctaggcaggtgtattagttcattctcatgctgctataaagaaatactcgagactgggtaatttataaagaaaagaggtttaattgactcacagttttgcaggcctcaggaaacttacaattatggcagaaggccaaacagaagcaggtacctttttcacaaggtggcaggagagaaagtgagtgcaaacaggggaaatgccagacacttataaacccatcagatctcatgagaattcactatcatgaaaacagcaagagggaaactgctccccatgatccaatcacttcccactgggtccctctcatgacacatggggattatagggattacaattcgagatgagatttgggtggggactcagccaaaccatatcagcaggggttctaagcacttatatatttaattagttctgttttatagttagtgaaaaagctgggatgtgaacccagacagtgattccagactgtattcttagcctttatactatattgtctctcaagacagaacaggcttcacagggttgtgggatcaaatgtgaagctcttagcagagataagtgctttattaataatgcctatattctaacatcattgagaatatactatacatacagttctgtattctactttttatacttcttatgtattttcctgtcattaaacatttttaattttaatggatacataattcatcatataggtatactgacattttatgactcttgtttttgcagagtaaattggagatataagtggttaaagatctaagtggttaaaatacattagattcatgtctttgaataactattgttttcctatcttttaaaataacagctttattgagctataattcaccctttaaagtatacagttcagaggtttttagtcaattcacataattgcgcaactaacattactatctaatttcagaacattttcttcactccccaaagaaacactatacccattagcagtcactctccattatatgctccctctagatgctggcaatcactaatctatgtctctgtggatttacttattctggacacatcatatcaatgataccaaacaatagggggccttctgtgtttagaaccctttcaagattcattcatgttgtagcatgtatcagtacaccattgcttattattgccaagtaatagtccattgtgtagatataccacattttattaatacattcatcagttggtggacatttgggatgtctctactttttgtctgttcaaaatgctgctgtgaccttttatgtacaagtttttacgtggacgtatgtttttagttctcttggatgtaaatatgtgagttgaattgctgggtcatgttgttactctgtgtttagcttcttgaggaattgccagctgtttccaaagtgcccacactattttacattccatgagcaatatgtgaggattctagtttttccatatttttgtcagtgcttgttgttgtccgtctttttgattatagccatcctagtcggtgtgaggtggtatcttgattggcatttccctaatgactaattatgttgaacatcttttcatgtgtttattagctgtctatagtatcttccttggaggaatgtctattcaagtcctatgcccatttttaaatcggattttttaaattgtcgagttgtaaaatttctttatatagtctggattcaagtcctttatcagatagaggatttgcagatactttctcccattctattggttgtcttcattttcttgattgtgccttcgaagcacaaaaattcttaattttgattacgtccaatttatttttttctttggttgcttgtgctttttgtgtcatttctaagaaaccattgcttaacccacggctcacgaagatttactcttatgttttcttctaagaattttgtagttttagctcttatatttaaatccatgaatcaatttaatttttgaatatggtgtgaggtaggagtccaacttcattctttttcatatgcgtatccagttgtcccagcaccatctgttgaaaagactattctttccccgttgaattgtcttggcacccatgttgaaaaactgaccataaatgtaagggtttgttttagactctttgttctattatattctgtatctttttaaatggtacttatggctctgctacttactaattgtgtgaccttcatggttggttaacttttgtctctcagttttctcgtttgtaaaatgaggaataaatagtaagtacctcatggggttattgtgaggattcaagaaaataatgtttaaagagcttagaatagcatctggcttatagtaagcacacggtatctgttagctgatgccatcattaccaccgtggctatcatcatcattaccatcataaaacttaaatgttattttctaacttgtatgtgacttgttttctttggctgaaattgtaaatgctgaaattagataccatgtttaaggagtgaatgttcttgttaagagagagtacagagtgcaaggaagattgagggcaaactcttaagaaatacttgtatttagacatttttattatagtagacaatgatttttttttaaaaaaaagtacttaaggaaaatactagagtccttgttttagactaattgggagtaagggggtcagctggaaagtcctgtaattatttaggtaggttaaaagtgtctgcaatagtagtcatgtatatgtattgctttttaaaagtcatatatatgtattgtaaaatcctggtgttcggggactatgggtctttttctaatttggtgtaatgtgtagtctagtgtgcttagcattgctgtttaaacagtggcaaactaatgttggcaatttaaaaattctagtttaaaatcaataattattaatttgtttatcagcaatagaaaaaaatcaataattagcaccatttagcattatgtgacagatatattagaagtgatatcatacctcatttgttctctaaagtttagctacttttattttcaagtaagcccatatgtacctggtagtgattttgagtgttagagtgcttaaaaaagaactccaactctcttttgccctttcttcccttcaccttacattcatattgttagcttgtgactgggctattttctactaattgtaaatttgtgtaactgatgacaaagcttatgacgaatgtcttagttctcggctttaggccataatttctgcattcctagagttcttttttaatcaaatatataagttattgacttgagacctcttttattataattatcagtaccaacatttattagttgtaaaataaaagaactaagtattttgataggctgttcctttcatcatgcttaaatttttcttctggcattttaaaatttgttttttttttcaggtgtcttcccccactctggtgatgcttattgttttttcttgtattttaaaaatttgatgtgattattattcctagatgtcatttgtcagagtgaaccgctgtggtccccgagttggtgtaagaaagacaccgaaagtaaagaagaagaaaacttcagtgaaacaagaatgggatgtgagtataggtgggatagtaaataatgtaacattactctggagaaatggacacagtgatatggccctagtcatgcaagatggtgttctgaatggggctcatcacgtaatagggtggaataggtttctgggcatgtgatattctaggtcttggagggaaaagcagaatcctttgggggaggtttttagaatacacacatccaggctgtaacctctatatcctctgaagaattggaatcctaaggggatggggagcatattttaaaaaacgtcttttcactttgactctgagaactcactgcataaaggcaactctagctcactggtgtcaatgaagtctgtgaatttttcggtaccttttttaggtttgctcagagcaaccagtgatatcataaccatgtgagtgccagttttggctgaaaaaaataggtgacctttgctctcttatcccatgaattgctcaattccagaggttgatcggtttcagaacaaatgttctcttgtggtataagacaaggctgaagtacctgtaacatgtgatgtatggctcctaacctgaatattgcctggtgttaccaaggggatttatatcttttttttaagagacagggtcatgtcctgtcacccaggctggagtgatgtgatgccatcatagctcactgcagccttaaactcctggactccagcaatcctcctgccttagtcctgagtagctaggaccagaggcatgcaccaccacccctggctaacttaaaaaaaatattttttgtagagacaggtccttgctgtgttgcccaggttggtcttaaactcctagcctcaagcgatcctcgtgccttcgcttcccaaagtgctgggattataggcgagccattgcacccagctagatttctcttttgtgacctgatactttggtttggaccatgagactttaggtgtctttactttccattgtgaagagtaactagttagggattagtttggatctcagggattcttttggacttggaatcttcttgtttgcaacctaccatgttagccagatatcctgggcaaactgacagcctttgaagtggggcagcgggacttctctgtgtttagattgttttgttgctgtctgattggctataaaattttaataacaaggatgtgactctaaggtaaggaaactgataaatcggaaaaaaaaaatatgtgataacatattttccccttcagagtggttactttgagaagtttagtacagttgacctttgaacaacatgagtttgagctgcacgggttcatttacgcatgaattttttttcaataaatacagttggctgtatcctggggttccacctctacaacgaaaggtggattgaaaatacagtgttttcaggatgtaaaacccagatatggagagccaattaggtgggatttgagtatgtgtggattttggtatatgtgggtgtcctggatactgtgggatgactgcatttattccaatatgccactattgcttaaaacttaattgaaatctatcatttgaaattgcattaagaaccttcctcattttatctgcagtgctggaaaaatcttttgttttttgaaggtagactgaacttggaaaatagtcataagtcatttggagtaaatggtaaatgatggagaagagatcaaactgattattactgtcttgataaaaatagtgaaacattttctgaaatggcttgtagattagatttaaatggaatgtcaaaagaaaatggttttaagcaatggttttagtattgatggaattattattttcttccatgagaacaaatttcaagcctatcacttacttgtatgcctgagtttttaaatgcctattaaaaacaattctcatgatcctgtagttgtaccttgtacctttcttttccttttccctttttttttttttttttttttttgagacaaggtcttgctatgttgcccaggctggcctcagactcctgggctcatgatgagatcttcctgcctcggcctcctgaacctcctgggtagctgagactacaagcgcacaccaccatgcctggctcttgtacctttctaaatcattgtaaaagtaataacagttttcatacagaaaagccttgagccaaatataaatcatggccaaaaagtttagtctttgatcagaagccatttttgactgttcgtattcctcgtcacttagaagtaaaactaacttgttttatttcctgccttaccaaatctgtgtagcaaaatggctgaagttgctttggaaagggccaagttacagggttgctacttagagctgtgcagcctgtgtaccacacaatttcaaggggtgctatttacacggactctgatattaatggtaacttatggagttgtgcagggtggtagccctgccatgatagtttagtgccttttaatttaactgactgtttttacattttatgaaattatgcattgccctcaaatttcatcttccattgtagtagcatctatgcttaagatgtttgcagacacaaattgaacctctctatagtgatcacactttcttttttttttttttttttttttagatagaaactcgctttgttgctgaggctggagtgcagtggcacaatcttggctcactgcagactccacctcctaggttcaagtgattctcctgcctcagcctcctgagtagctggaattacaggtgcccgccaccaggtctggctaatttttgtatttttagtagagatggagttttgccatgttggcctggctgttctcgaactcctgagctcaggtggtccacccacctcagcctcccaaagtgctgggattacaggcatgagccactgtacccagccagtgatctcactttcttttaggaacctttagcgttacgttgtggaatcctgggattccatagactacagtgtgaaaactaaaactttagttaaacttactcattttgaatatatactaccatttattcatatatcatatattcattttgagtattttcattgttttactatagtgtatgactgcttggtgaatacagtacttattttctgtaagacatctaaaattagtctgttattttctataaataggacacctaaaactaatatgtgttcatatctaaattgagaatactggttcctagaaagaaagaatttttggtcctaggattttgaaaccattttagccattaaaatccaataaatgtgtatattttataagaaaacttttttttttttttaaagaaaggccacctttttttacagaataccgtgactgatctaaccgttcatcgggcaactcccgaagatctggtgagtttaatatcaaaacttaagtcatttattcagtgttttatttggtatttgacttgtaacctttagaatagaaactataggcacttcctggaagttgttcagttatgtttaatcttgtttatgtctatataaaatcaaaacgcctatcttctggacttcctgatttgagctaggaatatcaattagtatgtattagagtttcattaaatatgttgggtttatagttgaaatctcttcagtctagtactgcctgatatatatctatctatctgcctttttaaaaaatctatagatatcttcagcattatttattacttccctatacaaacatattgttctagtcagtgtaataatttctgtgtatttccatgtctgagcccccattccttacttggaacagtttctgtaccttcttctctacccgttcaaatcttaccttacttccttatcctagttcaaatcctactttttttttttatgtttccacttaggttttttttttttttttttttttaagatttattgagatatagttcacataccatgaaatttacctgtttaaagtgtgcagtttggtgatttttggtatattcagagttgtgcaaccattgtcactatctaattttggaatgttttcattaccccaaaatgaaaccctctacccattaacagtcactccttgtgcccagttcttcccagtttgtggcaatgaccaatgtactttgtgcttttatgtatttgcctattctggtcgtttgatatatgcggaatacaacacgtggccttttgtgtctagcttctttgtcttagcataatattttcaaggttcatccctgttgtagcatgtatgtctctgcccactgcagcctccacctcctgtgatcaagccatctccacctcagcatcttgagtacttgggactacaggtgcatgccaccacgcctggctaagttttgtattttttgtagacacagggttttgccgtcttgcccaggctggtctcgaactcctgggctcaaggaatctgcccacctcagcctcccaaagtgctggtattataggcatgagccaccacgcccagctcatagtagttctttattccttataattgccaaataatattccattgtatggatctaccattttatttatctgttgttcagttggtggacattgcattgtttctgcttttgcattgttaggtataatgctgctgtgaacattcatgtacaagtttttgtgtgaacatgtattatcagttcttttatatgtatacatctaggagtaaaattgctgagtcatataatttctccatatttaactttctaaataattgtcaaactgttctatgaagtggctgcaccatttacatccccgccagcatgtatgaggcttccagtttcctcacattgttactgtcacctttttcattttagttctcttagtaggtgtaaagtgctgtctcattgtggtttcaatttgcatttccctaattgataaaggatgttaagcatccttttgtgtacttttcggccatttctactatattctttggagaaatgtctattcaaataccttagtcatttaaaaattggattatttgtgcttttattgttgagttataaaaattatgtatgtattctggatttgagttcctaatcagatataatttgcaagtattttctcccattttcttagttgttttttcagtttcttgatggtgtcctttaagcagggaagtttttaattttgatgaagtcaaatttacctgttttttattttgtcacttgagtttttagtatcatacctaagaaactgttacctaacccaaggttcacaaagacatactcctatgttttcttctaagagttttatagttgtagttcttatatgtagaactatgattcattttaagttaatttttctgtatggtgtgtggtgggaggggggcccaactttattttttgctaaaggataatcattgtccaaacagcatttattggaaagactattctttccccattgaatgatcttggaactcttgttgaaaaatcacttgtccataaatataaatgtttattcagcactctcaattctatttcactgatttatatgtcaatccttatgccagtaccacattgtcttgattactgtcgttttatagtaagtttgaagtcctgtttttgaaactgaccaacagttatctcctctgaactattactacctaacttaggcattgagtatatgacatctaatgtatatcatttgtctttataaggatgtgcccaatctcaatgggcagattgttaatgcttttgagagatacagaccatatcttatacatctttgtgtacccaggagtcttaatcctagtaggtgctcattaactatttactgagaataataattatgcccaactgagttaatattttttaaatgaaaaatttcaaactcaagggaaaatggagataaaaatagaaataactactatgtactgttcacccagataggatagttattaaaaatttgccacagttgcttcatttatcttacccttttcttttttctctgaaatattttaaagcaaattccagagaacacatcattttgtgcttacatattcagtttgcattttttaaaaatgtaagccttttttttttcaacataaccacagtgccattattacatccaacaaaagtaaatataattatttgtaacacctaatacctagcccatattcaaatctcctcagttgtctaaaaaatgtcatcttcatttgttttttgtgagtcagaatccttgtgtaatacttgttattgtctctttaatggattgattttttatttacatggtgaaaactcagtagtacattttatcatatatgttcatgttcatagttctgaatactagagtacttgtaaaatcaaatatctaattttatttcttagccaccttagtgaaccttagtgaacccaccttagtgaaccctctaacacttgagatctgtggcgcgtatctcttcttgtacttcaggaactctatttccctgacttctgtattttcagtgacccactcccacatgaggccattgaagggctataaacactacattattatttcttggtagtagtgtgatgatcatgaaatgagtgtgtctttgccaaagatgactcggtggattttgtaccttttacattgtgctcagttagtgtgtgtatatgtgtgtatgtgtatgttaaaaaaaaatgctggttttgacccatgaattgattttatcatccattaagtgagtcccaacctgtggtttgaaaaacactagtttgctggatagtcttgcagaaaagtagtagaaattattatttctttctgtacatcttttaggtaggtttaccagttctatatactgctttctttaagatcatttttgaaaatttaggggactgaaaattttggctatgaatatatataaacatgcacatattggaccagaaaaagtttaaaaagtgatgaactagagtaggtgatctcatcatctgaataggcaacttctttgtgtctgaaacattcctttatgtacttttctcttctgtataggtacgccgtcatgaaatacacaaatcgaagaatagagcattagtacactgggaactccaagaaaaagctttgaagagaaaatggaggaagcagaaaccagaaactttaaatcttgagaaaagaagattgtctatcatgaaggaggtaatgctaaactgcattagagttagaaagaaaaaaaggagataaatagggttctttgtttttcttcaatttgattcacgttggagagactctagtaatcactgcattcttattcaataatctacatgtggacttcaaaaaaagcaacagagtggtgactggagtctggtttggtggtttgaattcctgttctactacttaccagctgtgtgaccctaagtaaattatttaacttttcagcctgaattttctcatatttaaaattattatttgcttgtattgctatgagatttcagtgatataatacttacaaagtgaatagcacaatctttgcttattcctctttttgtatataagctgctataataatttttctcagtaaagtgattagcacaatcttttcttattcctctttttatatataagctgctataattatttttctcagtttaacagcagtgctgttaggttactttgaaaaaaaaatgatgttgtatgcttgtccaactgagtaataagcaacttgtctttggcttaaccttttgccagacgtggggtgttcagataagtaatcagatatgtagggataaacaatatgggaaataagaggaaactacagcaaataacctttttaaatttgagctgaagtcattgtgaaggaatgtgctttgtctgtagtgttgctccttgttcatattgaagcttatgtacagcacttagctgtctgacctttcacggcagctttgaatcatacattttcttttgaggaatttgttaggcttcttattgaaataaagtctcagtcttagacatcatcaggaagaataatatctcccaaataaatgtttacatgagcttgagaaaagaacagtggcttgattgagagaatgcttctttacaggtaagtatcttttggtgatcttggacaagtcgcatacatttaaatgttatggggtaattctcagtgaaaggcctaaaaacacagatctcaccacgaaaaaaggcagcctgcttggattgcatcagactctgggcttattttcctttctctagtggttcctgctcatgtcctgaatttctcatacaagttatagatgtggtagaagtaggtgtttaaagaagggtggtgagagacgatgagtgatgtttctttgccttctttttgtagatctgctgcctcaggcactagtatagtggttctcaactctcactgcacattagaatcagtcagggtcaagaagctccattaaaaaaatatataacagctgggtgtggcagctcatgcctgtaatcccagcattttgggaggccaaggcgggcagatcacctgaggtcaggagttcaagaccagcctggccaacatggtgaaaccccatctctacaaaaatacagaaattagctgagcatgatggcgggtgcctgtaatcccagctacttgggaggctgaggtgggagaattgcttgaacctgggaggcggaggttgcagtgagccgagattggtccattgcactccagcctgtctcaaaaacaacaacagcaaaaccaaaaaaaaaaaaaagccctaaagattagctgggtacagtggcaggtgcctgtagtcccagctactcaggaggctgaggcaggagaatcgcttgaatccgggttgcagtgagctgagattgtgccactgcactccagcctgggcaacagagtgagactctgtctcaaaaaaaaaaaaaaaaaaaaaagctctctttctctctctctctctctatgtatgtatgcatatatatataactatatctggactctatacccagagattcagatttagttgacctaggatgtggccccatgtaggtgttttttagacagttcctatgtaatttgaatgtgctgcaggggttgagcacctcagctctcatcaggattcaggtattttctctctaccagcatatcttgggataatttcctgtcagtgcttagacatctaccttttctttttgatggccattagcatatagatgtaccacaatttatttatcctgtgctttattggtgaacacttaggttgtgtgttagagtatagtttaagcttctggaaataaaaaaataccctcctatatgttttgctttaaacaaacaaatttgtttctgtttattaaacagttgagaggaaagtggtagctggtagggaactctgcagtcctttattacacagcttctgtctctgaatacaaaatggccatagcagcttcattcagctatatgccagccagcaggaaacaggaagaacagtgcatgctactcctattacatgtcacccagaagttctggcatatatcctgttggccagaaagtcatcacatggccattcccacttacaaagatggttgggaaatctagctatgtaattggctaaaatgcaggagttctgctgttaaaggagaaaccaaaagaacattgctggatacttaagtagtactgtcagttacccacagattgtcttctaccttgctactatcaataatgtaataaatatccttgaaaatgtttttgggtacacatgtaagtatattttcaggataaattcttaaaagtagaattgcttagtcaatggatatgtgcatcttttatttcaatgttggtaaatttgcaacgtctctgtttaagggatgcagtggaccaaaggaagaagcctccttagacatattcacataagcttcatcattatgtattaaagctaacaggacccatccacctgaagctggactcccagattaacataaattaagagaaagctctttggccagcataatcttagatttcatttgctgtaagatgtacccatgccatgggaatcaagcaaattagggttccctctcactcatggagaggctttcaaaaagatcttataaatccccaaaatgtaataactcctaaagcctctttgtaatttcccaattctacctcatgtcttttactgtggtacaaaagggctaagatgacgagtttctgataatgtctttttttttgtagagactgggatcctttgaaaatccaacatgtgtaccaccacttacaggtttaagtttgtgctctgcaaactcatttgaggagtaatagatagagttaggcttgtagagatcagtttacctgtcaaatggatgggctttatgagaggagttataaatctagaaagaagaagtaaaagccaatacactgatctttgatcactcaaaccatttttcccaagggcagggactaaacaggggtttccagtcttttggcttccctggggcacattggaagaagaagaattgtcttgggccacacataaaataaactaacattaatgatagctgatgagctaaaaaaaaaaaaaaaaaaaaaaagttgtaaaaaaaaaatctcataatgttttaagaaagtttacaaatttgtgttaggccacattcaaagccatcctgagccacaggttggacaagcttggactagcagaaggtgacagataatggtttttacatgagacctcattataatcaatatcaggtctcaatatggttataagattataatcttcatgtgtcaattccatctctttattttgataggtcaatgcttttaaaaaatagtaaactcttaaaattattattaggaaataagctttgtgtaatttttctggtatagtgaaagattatactcattcattcacattctttcctaagctcataattccttgtacttgcaagacggctaagtaagaatagaaatttggtttgtgggataatataatttaagttatagcaaaattctgaaacatctctagagtggtatataggttttcagtgtttccatatccatctaccacccctgtggggctggggaagggttgttgactgggactggactctcagtcttctgggtctgatgtgctcttgacctgataccattccaaagcttactctttgtagaaggaataaattcagggctttcttctcactgagtcagccaacctgcttggctatagccggggaagaaggggaaaaattaagaatgtgactcttgctatttttctttctgtgtcttaaaacaataactgaggtcacattgtgtatgtatttgattctgtagtatagagaaattctggtaagagtatttgttatcagatattttatcaatttgagtcaagtgttggaaactgagcagtttccaggtactttttaacttgagaatgccatctggtggtggtgccgagagaattatctggcttttactctagcctgtggccttacttttaattatgaaagttcctaagttgaaagtgcataatccagaggcactactgtaatgttactttttgtgttcttacctctccagggtaaaaaactgatttgtttttaaacacagaggcctcacattttttgtttaatgctaaaactcatatcttatgtcatgtttttaaagttgtaggtcatgacttgacacattagtggattacattagtggattctgaattcactctagtggttgaaacacctctaagtttatggctcaaagattcatatctttcatctgtgtttttcaaactatggattataatttgttaatgaattgtgaagtgagttgctgccaacatttaaaaaatagaatagaaattaacaagaaaatatcagtggttctcatggagcaaggttaattaaaacttttattttaattaactttttatttaattaaaacttttattttgtatatgtgtatgtaaatgtggtgggtcacaattgtgaatatttcttttttttttttttgagacggagtctcgctctgtcgcccaggctggagtgcagtggcgggatctcggctcactgcaagctccgcctcccgggttcacgccattctcctgcctcagcctcccaagtagctgggactacaggcgcccgctaccacgcccggctaattttttgtatttttagtagagacggggtttcaccgttttagccgggatggtctcgatctcctgacctcgtgatccgcccgcctcggcctcccaaagtgctgggattacaggcgtgagccaccgcgcccggccaattgtgaatatttcttactttggatttcagtcaggtattggaaagccactaattattgtcttagccccatctactggttcttaaggatattgctactgaaggtttttaggaaggtagcctatggttattttcatgctccaggcctttttatggtcttttcctttgcgatttgaaaagtaaatataatctgaataataatatttgtcattaacacatgtctagattctttctgatcaataccagatgcaagatgtgttggagaaatctgatcatctaatagctgcagcaaaagagctgtttcctcgtaggcgcacaggtattcaattcaaacaaaagcttctctattttattaactgtagcccacagttgactatttggaagaatttaaagtcctttcttaggcatcatattatttatattacaagtattgtagggtggatttacaagggttgttagggttagagtcattataatctgtttcctttccactaagaatattaactacttgtattacaaataattcagctaaggaaaagtaaattgttttaatctactaaaatatggtgtaaagtacaggattttgtaattttaaaatgtgacttgaataaagcttaatttgaaacctaaagcaacttcagtctctctctaagaggaactttgcctcttgtcagatacacgcattatttattttaatgtgtgtgtagttcattgtttatcttaatcttctagaaacatcattagtttttcatgtaaggtttgaattccggcttggcaatctattagtgttactctgggctagttacttaatgtctgtgagtttcagtttactgatctgtaaaatagtaattgtacttatagggttttatgagagtaaaatgagttaatatatgtaagtacgtttagaacagtgcctggcatatagtaagcactacattaatgtgagctgctgtttaagattttcatatgatgatgcaaaccaatggcagtatagagcttgtgaagtcaagttaattaaatgaaacaaatcatcacaacttcttttccttttgcagggtttccaaatgtaacagtggctcctgattcctctcagggtcccattgtggtaaatcaagaccctatcacccaatctatctttaatgagtctgtcatagaacctcaggtaatgtgttccactcacagctataacactcatgctgaaaggaagtttaagttgatataggccttgtggtaaatattttaaaagtttaaatatcaacaagtgctagttgtggttgctagatttgctcttaagtgtattgcactttctgtgagtaatgtttgtatcaaacaagactggataataatagctaaaatttactgagtgcttacctagtaggtgtatatgctgctttatccccatttggcagatgaagaaattgaagctgagaaaaattaggtgacttggccaagatcacatagtttgcatcagagatgggattcaaatctaggccatgtggctcaacaagactgccaccatcgatcattatggagacagcagggagtctttccacttggagtcaggtggatctacttactagctgtttgttcttgagctgatttcttaatatatctgggtgggctcagaatgtgttttgcttcttcgttttttgttaaatgggactagaatgtacctgatatcattgttgcatggatcaggtgcgaaaagttatgtaaaattcctggtataataccaggaacatagtactttgtaaatgttagtctcttttaatgtattaggatatttaaaaaatagcttcacaagaaacttgcaatgtatcaactagttatatgggagaattgtattacagtagtaaaacattaattggctgtattctaacctaatgggaattcttaattaatgaaaatgtttagaattttgagatagtaaactttttttaaagcccgtgaataatttaatactaaaataagacaacttatgcatgactaggactcagtacctgtttaatgaaatttcctaagttatagtttctatgaaaaaagaagagaatcatcaattagagggatattcctagggagttgcaaggtccagaatcataaaagatatattaattatattgtttcatacttccaaaggcaattaagtaaaatgttacacatattttaaatagccaaaaaccttttaccatatttccggcaaaaaccatttatgttttggcacttaatgagaagttagctttcagatagctggaaatttaatcaccctagaatatcttattgctgtagtatgttcaactgaagattttacttttatttaaataaatcataagtgaagtgtgccctatttatttcagtcatactttaagtactttttcagttaattggagcctgtaaacaagtacacgatgtatcccagcaacatggaataaagcagtcagattttattctgttgaagagtccattcgcacacttgagcttattaccattaatacagcagtagaatttcaaattaatgttactgatacaactaatttacctacctggtttaagtactttctcaatttacagctgatagcagatgaaaaacagtgatgtgagcctctcaaagcagaggtagcagagaaaaatggcagtgagggaggagagagaggatacctgaatagataagcagaggaccactatacatcagaaaggaaattggtgttgctatagataatctttttttttttttttttttttttttgagacggagtctcgctctgtcgcccaggctggagtgcagtggtgcaatcttggctcactgcaagctgtgcctcccggattcacgccattctgctgcctcagcctcctgagtagctgggactacaggcgcctgccaccatgcccggctaattttttttttgtattttttagtagagacggggtttcaccatgttatccaggatggtctcgatctcctgaccttgtgatccgcccgcctcggcctcccaaagtgctgggattacaggcgtgagccaccacgcccggcctgctatagataatcttgagtcaccaagaaaaaatgaattgtaactgcattacttaagttctctgggtcctagtttcttcatccatataggaattagtgagactaaacctactcacttattcatcatgtaatatttcagatcatgcactagatgctaagatacatagatgattaaggcatgtctctgtcattggattagggaaatagcaggagttgaggttagagagacaagtaggacctaggtcctgaaggactaaggactggaaagtaaaagtagagtcactgaaggattttaaagagtggagtcatgatgagatccagtatagtgtggaagatggattggggagggacaagactggagagagggtctggttagaagacttaggtgggcatcttagaagtggtgagggcctgacccaaagccatgccaatagggaaggaaatagaggagaatagggatagacttgagagtggttaaaatgaggtagagttggcaggattcggtggccgataggacaggacaagtgagaaagaaggataactcctcatttgctggcttgagcatttgagtagatggtgacactgttcatggtcttaggtaatattggcaggaacaaagtttctggaagaatggttggagggcttagaaagctgttcagcttggacctattgagtagggatttttttttttcttttttgagatggggtcttgctgtgtcacccaggctggaatgcagtggcacaatcatgactcactgcagcctctacctcctgggctcaagcaatcctcctgcctcagcctcttgagtaggtgagaccacaggtgcacgccaccaagcctgcctaatttttgtgtttttggtggagacggggttttgccacgttgcccaagctggtctcaaactcttgggctcacatgatcctcctgccttgccctcttaaaatgctaggattacagaaatgagccactgtgtctggccagaatagagatatcttataggcagttgaatatgaatgtctggggcttaggacagatctgggtgtgaagatagaggtttggaaattaatagcatttcatttgtaattacagctttggaattagataaaaacattcagaaagtggatcagatgaggggagaaaaggttgatataggccttttggtaaatattttaaaagtttaaatatcaacaaatgctagttgtggttgctagatttgcttttacttaagtgtattgcacttcctgtgagtaacgtttgtaccaaacaagataagactggataataatagctaaaatttattgagtgcttacttagtaggtgtgatgtgacttgagtcacatcatcagatacaaggaaagggtagaaaaataagatcagtaaaggagattgggaaggaatggccagaagagtaggagaaaatctaagaaaatacagtattatgggagttaaaacaagtgtatcaagtagcgttttttttttttttttttttttgagacagggtcttgctctgttgcccaggctggaatgcagtggcacgatcacaactcactgcagcctcgaccttcctgggctcaggttattctccctcctcagcctcctgactagctgagactacaggtgtgggctacctcacctggctaatttttaaatttttttgtagagacatggtttcgccatgttgttcaggctggtcttcaacacctgggctcaagtgatccacttgccttggcctcccaaagtgctagagttttaggcatgagccaccacacctggccaagtggattttaaaggaaagaaatgagtggtcagagaagtaagggaaggcaaagacagaaatatccatttgagttagaaataagtgtgttgaggttgaccttgtagagagcagtttgagtagagcaatagggcagaagaagcaaagttgcagggcataggtggtgagtgaggagggtggaacaactctttcaagaagtttggtggtagaagaaagaagatatatatagcttaaggtaagtatagggtcaggttaagatgggagaggcttgctcacatttaaatgttggtgaactgaagccactacagagacagatgttgaaaatgtggtagagagataggataattgatagtagtggaaggatgtgagaagatttgtgttctacaacatgtggagggcttaggaggagggaactctcttctgttatgacagaaaaaaaaaaagaaagtctgagtatatatataatcaacttgtgctatttttattgttgtgttgagacaggctcttaatgatgtagatggtgaagaagaaggaactgttaatagccagtcaggagaaagtgagaatgagaatgagttggataactctctaaactctcagtctaacacgaatacagacaggtatgtgtatatggcataaatatttacaactctcaggttttttccatggccatttcaatgtttgcctattgcatcattttttattaaatgggagtttatttttatttaaaaatttgtttattttggtatttccaaataatttgcagggataatataaaaagctcttgtatactctttactcagattcatcaattattaatgttttccacatttcttttatcattttatctcctttctgagtatgcacacacatgcatgcatgcacatgagcaccagtcgcctgagtaatatacattgtacccaatatgcagttttttattccgcacctacctcccgccctcccccttctgagtctccaaagtttgttatatcactctgtatgcctttgcatatccatagcttagctccttagcaagtaagaacatgtggtatttggttttccattcctcagttacttcacttagaataatggtctacagctccatccaagttgttgcaaaatacattattattttttttgtgtgtgagtggctgagtagtattccatggtgtgtctataccacattttctttatccactcattggtcgttgggcacttagtttggttccatatttttgcagttgactaacatacatttttaaagaactattaggaagtaagttgcatgcttcatgttcctttatccctaaataattcagtgtgtggttcccaagaaaaagagcattcattcagataaaatcacagtacaatgatcacaatcaggaaattacattgatttaacactattatctaatccatagaccttatttagatttctccagttgtcacagtaatgtttattttgttttttggatgattgaataactaatcataatcacttattatatttagttttcatgtcttttcatttttaaaaaaaacctggaatcttctaaaatctaatcttagtgtttctttgccttttatgacatttttatagttttgaagaagtacagggcagttattttacagaattccctctagtttgactttgtcttataagttcttcattattagactcagcttacttatgcattttgggcaggaatatccctaaagtgatgttaagtcctcaatgtgtcatatcaagaggcagtgacaccttggtttaattattggtgctgttaactttcatcatttggttacagtgatgtctgccacgttccttcaatggattatactgttttatcttttatttattttgatgtttatttgtcacatatttgggagcttcttcaagtaattcctgtgtccttttaacgtatcttctttaatgtttaatttctggcacaacatagctcttattatactttctcttccctggaatcaaccatttcttcaagaatccttagctcattttattaaagaagggtatttaaaaaccaagctctaagtattagatgcgtttattgcacttggcagtcattgtttttagaccaacagatacatatatatgcacacatacatatatatacctatagtcatatgtatatgaacatatctatattagtatctagttttctgtctatttagctataaatcatgaatttacagtgatacctctaagtccaatttaacactattggttttatcttggtcttcttattccacatttgtatcactcttctttaacactgagcagcatgtctccaaacattacacaagtatatttattcatattcaatcctgcaatacatagaaaatagttttggaattgctgcgcccatactactgcaaaaataaacctgctaagtagagttcaagattgtttgcagatttctaaaaggttattgtattcatttgaaatataattaggttcatttgcttctatttgtattcaattttaggtttttacctctctttttgacaaaattatacaaaaagctgttttcagggtagtgtcagtcaccatcccctatcccttctaactagttcccgtctacacttacccttgtaggtgatcagtttccttagtttttaaatttattctttctgtgtttctttttataaatgtaagcagatatatatatatatatatatatctccttattttctcttatataaaagataacatactccttattttctcttcttatataaaaggtaacgtactatatttgcttttcttttactttaattgacaataaatgtgcatgttcatgaggtacatagatgttttgatacatataatgtatagtaatcagattggggtaattaacatatccatttatatttgcttttaccacttaatgatatatcctggaaatctccccatagctgttcataagtttacacaggtatttttttcttcatttttataataaaatgaaacagttggatagtactaaattgtgtgaatgtactgtagtttatttgaccattctcatatatatatattatcattttttattgtgtctatttgattcttctctctttttttctttattagtctggctaccagtctattttgttgatcttttcaaaaaaccagctcctggattcattgattttttgaagggtttttcatgtctctatccccttcagttctgctttgatcttagttatttcttgtcttctgctaacttttgaatttgtttgctcttgcttctctagttcttttaattgtgatgttaggtgtcaattttagatctttcctgctttctcttgtgggcatatatatatatatatatatatgagaatggtcaaataaactacagtatatttgatatactatatatatatatatatggtcatttaggttattttcagtattttattttatttttcattttttgagatggagtctcattctgttgcccaggctggagtgcagtgtcgccatcttggctcactgcaacctccacatcccaggttcaagtgattctcctgcttcagcctcccaggaaactggattacaggcatgcgccaccaggcctggctaattttgtatttttattagagactacattgttcagttcccacttaaaagcgggacatgtggtgttttgttttctgtgttggtttgctgaggataatggcatccagctccatccatgtccctgcaaaggacatgatttaattcctttttatggctgcatagtattccatgttttattattaaattaactagagagaactggcatctttatgacgttgaattttgctattcaagaacatagtatatttttccatttgttaaaaggtccgctgctttcttcagagccgtcaggcatagatgtttaagtctgatgaagctgtgcccacagccgccccttctcccaggtgctctgtcccagggagatgggggttttatttataagtccctgactggggctgctgcttttttttccagacatgttctgcccattgaggagaaatctggcagtctggccgcagcagctttgctgagcttcggtaggctccacccagtttgaacttcctggtggctttgtttacactgtgagtgtaaaaccacctactcaagcctcagcaatggcagctgccccttcccccaccaagctcgagcgtcccaggttgatctcagattgctgctgtgttggcagcaagaatttcaagtcagtggatcttagtttgctgggctccgtggtgtgggacccgctgagccagaccacttggctgcctagcttcagccccctttccaggggagtgaacagttctgtctctctggcgttctaggcgccactgtggtatggaaaaaaaaaaaaaaacaaacaaaactcctgcagctagtttggtgtctgcccaaacggccccctagttttgtgcttgaaacccaggaccctgctggggtaggcactggagggagtctcttggcctgcgggttgcgaagactgtgggaaaagcacagtatctgggtcagagtgcaaggttcctcaggctcagtccctcctggattcccttgggtaggggagactttaacactttatggtcagtattagacagatcgatgagacagaaaattaaaaaggatattcaggacttgaactcagctctggaccaagcagacttaatagacatctacagaactctccaccccaaatcaacagaatatacattcttctcagtacctcatcgtactttttctgaaattgagtaaaacactcctcagcaaatgcaaaagaatggaaatcataacaaacagtctctccgaccacagtgcaatcaaattagaaatcaggattaagaaactcactcaaaaccgcacaactacgtggaaactgaacaacctgctcctgaatgactactgggtacataactaaatgaaggcagaaataaagatgttccttgaaaccagagagaacaaagacacaacataccagaatctctgggacacatttaaagcagtgtgtagagggaaatttatagcactaaatgcccacaagagaaagcaggaaagatctaaaattgacacctaacatcacaattaaaagaactagagaagcaagagcaaacaaattcaaaagttagcagaagacaagaaataactaagatcaaagcagaactgaaggggatagagacatgaaaaacccttcaaaaaatcaatgaatccaggagctggttttttgaaaagatcaacaaaatagactggtagccagactaataaagaaaaaaagagagaagaatcaaatagacacaataaaaaatgataaaggggatatcaccactgatcccacagaaatacaaactaccatcagaatactataaacacctctatgcaaataaactagaaatggataaaatctagaagaaatggataaattcctggacacatacaccctcccaagtctaaaccagaagaagtcgaatccctgaatagaccaataacaagttctgaaattgaggcagtaattaatagcctaccaaccaaaaaaagtccaggaccaggcagattcacagccgagttctaccagaggtacaaagagaagctggtaccactccttctgaaactattccaaacaatagaaaaagagggaatcctccctaaatcattttatgaggccagcatcatcctgataccaaatcctggcagagacacaacaaaaaaagaaaatttcaggccaatatccctgatgaacatcgatgcaaaaatcctcaataaaatactggcaaatggaatccagcagcacatcaaaaagcttatccaccacaatcaagttggcttcatccctgggatgcaaggctggttcagcatatgcaaaaaaataaatgtaatccatcacataaacagaaccaaagacaaaaatcacatgattaacctaatagatgcagaaaaggcctttgacaaaattcaacaccccttcatgctaaaaattcaataaactaggtatcggtggaacatatctcaaaataataagagctatttgtgaccaacccacagccaatagaatactggatgggcaaggcaaaaggcaaggatgccctctctcacaactcctattcaacatagtattggaagttctggccatgacaatcaggcaagagacagaaataaagggcattcaagtaggaaaagaggaagtcaaactgtctctgtttgcagatgacatgattgtatatttagaaaacaccatcgtctcagcccaaaatctccttaagctgataagcaacttcagcaaagtctcaggatacaaaatcagtgtgcaaaaatcacaagcattcttatacaccaataacagacaaacagagagccaaatcatgagtgaactcccattcacaattgctactaagagaataaaatacctaggaatccaacttacaagggatgtgaaggacctcttcaaggagaactacaagccactgctcaaggaaataagagacgacacaaacaaatggaaaaacattccatgctcatggataggaagactcaatatcatgaaaatggccatactgcccaaagtaatttatagattcaatgctatccccatcaagctaccattggctttcttcacagaattagaaaaaactactttaaacttcttatggagccaaaaaagagcctgcatagccaagacaatcctaagcaaaaagaacaaagctggagtcatcacactacctgaattcaaactatactacaaggctgcagtaaccaaaacagcatggtactggtaccaaaacagatatgtagaccaatggaacagaacagagccctcagaaatacaccacacatctacaaccatctgacctttgacaaacccaagacaaacaatagggaaaggattccttatttaataaatgatgttgggaaaactggctagccatatgcagaaaactgaaactaggcttcttccttacaccttatacaaaaattaactcaagatggattaaagagttaaacgtaagacctgaaaccataaaaaatcctagaagaaaacctaggcagtaccattcaggacataggcatacacaaaggcttcaggtctaaaactccaaaagcaacggcaacaaaagccaaaattgacaaagaggatctaattaaactaaagagctcctgcacagcaaaagaaactgtgatcatggtgaacaggtaatctacagaatgggagaaaatttttgcaatctatctatttgacaaagggctagtatccagaatctacaaagaacttaaacaaatttacaagaaaaaaacaaccccatcaaaaagtaggtggaggatatgaacagacacttctcaaataagacatttatgcagccaaaaaacatacgaaaaaaagctcatcatcactggtcatcagagaatgcaaatcaaaaccacaatgagataccatctcacgccagttagaatggcgatcattaaaaagtcaggaaataacagatgctagaaaggatgtggagcaataagaatgcttttacactgttggtgggagtgtaaattagttcaaccattgtggaagacagtgtggcgattcctcaaggatctagaactagaaataccatttgacccagcaatcccattactgggtatatacccaaaggattataaatcattctatacagacacatggacacatatgtttattgcatcactattcacaataacagagacttggaaccaacccatgtgcccatcaatgatagactggataaagaaaatgtggcacatatatagcatggaatactatgcagccataaaaaagatgagttcatgtcctttgcagggacatggatgaagctggaaaccataattctcagcaaactaacataagaacagaaaaccaaacactgtgtgttcttactcataagtgggagttgaacaatgagaacacacggacacagggaggggaacatcacacaccggggcctgttggagggttgggggggctaggggagggatagcgttaggagaaatacctaatgtaggtgacaggttgatgggtgcagcaaaccactatgggacgtgtatacctatgtaacaaaactgcacgttctgcacatataccccagaacttaaagtataataataaaaaaaaaactagaaaaaaaaaagtctacttttctgtttttcaacagcgtcttaacatttctctcatatagagtttgcttatttcttactgagtttattcctaagtgttttggggcttttgttattcttttaaatggaattttgtcttccattatacctcctaactagttattctttgtttttatgaaagttactgatttccatgtgttgccttgatattctgctactttattgaatcttggttgaattagttttagcactgattttctaggggttcctaggttgactgtcatctcatctgcaaatagacattgttttccttgttatctaagtctttcacctctaattggtttcttttgtatattttattagttataggacagtgttcaataataatggagatagtggggatccttgccttgtttctgattgtatgaaaatgcttctattgtttcctcttaagtaaggtattggctttagtactgaggtcttttttctttctttctttctttctttctttctttaaatttttaaaatcattgttatttttagtcttttttgagacaggatctcactctgtcaccctggccagagtgcagtggtgtgatcacagctcaggtaatcctctcacctcagcctctcacctcagcctccctcagcctctagtagccgggactacaggcatgcaaacaccatacccagatacatttttttttaaacaatgctaaggaaatgccaatcaattcttgttttcttgattgttttattttaatcagtaataagtgttaattttatcagactttttcaatatctatagagataatcatatgagttttctgcttatgtctcttaatatggtacattatgttatgagtttcctaatattgcgctatccttgcatttctgcagtaaattctatttggccatgatgtgttattttcattaatggagtattggaggttgtttgttaatattttatttagtattcttgtgttaaaattcataaatgatattctctgtagtttttttgtgtctgcagcctttatcagattgaagtaacaatgcggtacttgatttcataagaaccatctggaagatttttctaattttttaagtcctggaacaatttatatagcactgagactatctgttttttgaggctgatagctttcctcctttgaaactatttgcgcatggtgctttttttttttctgtggggaagtgccatagtaactttgcttgtttatttaagcttctatttcttctcaagccaatttttataagttatattttcttaggaaattttccatttcatctaggttaatcaatgtatttctatagagatgtgccaataatctctatacttcttaaaaaattttgtttcagtgcttacttgttctcctcaatcatttattttggttctctttctttaaaattaggttatttagtggtttgcctattttatgaatttttgaagaactaacatttttaatttattagttagaggtctagttttctgatttcttcctcatcaatttttgcttttgtctttatttccttcgttgtgcatttttttgtttactttttctagtaaccctagttgagaatttaatacattcattttcattcttttatttttaattgataaacatgtttagggctctgaattctactctgatcactactataaatgtgtaccatacattctggtatgtagtgttttgttactttaggaatgaggtaatttcagtttatattttcatgtttacttaagaattgtctaaaaagtcaggaaacaacaggtgctggagaggatgtggagaaataggaacatttttacactgttggtgggactgtaaactagttcaaccattgtggaagtcagtgtggcgattcctcagggatctagaactagaaataccatttgacccagccatcccattactgggtatatacccagaggactataaatcatgctgctataaagacacatgcacacgtatgtttattgcggcactattcacaatagcaaagacttggaaccaacccaaatgtccaacaatgatagcctggattaagaaaatgtggcacatatacaccatggaatactatgcagccataaaaaatgatgagttcatgtcctttgtagggacatggatgaaattggaaatcatcattctcagtaaactatcgcaaggacaaaaaaccaaacaccacatgttctcactcatagatgggaattgaacaatgagaacacatggccacaggaaggggaacatcacacactggcgactgttgtggggtggggggtggggggagggatagcattaggagatacacctaatgctaaatgacgagttaatgggtgcagcacaccagcatggcacatgtatacatatgtaactaacttgcacattgtgcacatgtacgctaaaacttaaagtataataataattttttaaaaaattgtctaatagaagatttaaaaaaaaatttccagagcctctttgtttttctagttttattacgttacattcagagtgtgatttgtaatatttctacctgtggaacttgatgttttctttgtgacctaatatatgatcaaatttttacaaatgttccatgtgtgtgcctgagaagaaggtatatactctaacaaggtataaagttctaaagatatatccatagatctacctcactgattatattgttgaatacttttgtatccttacttatttttgccactcttttcttctgagaatggtgtattaaagtctcctactactagtatgtttctatttctctttgcattttgtttaagtatatttaattgttcagagttaaatacttcctttcttataaaagtgattcttgtgttttttggtccatgttttttggaacataagtgttatatcttcattgtgatttataacttttagcattataaagtatgctttgtcacatttaataccttttgacttcatttctacttcatctaatatcaggaatgaaacctctacttttttcttgtttccaatttcctggcttatcttggctttttacatttagctttctgtattttagatgtttaatatatttagccttctggaattattttgtattaagtatgtctcttgtatacaatgcagagttcagtcttgccttgttagacaatttggaaatattcttcttttaattgaagtaagcttataacacttactgatatgtttgatgttaacttcatcacattattttatagtactgtttattgtactataatttcattttctatgtgatgtttcttctctgttcttttaaaaaatttcttttggtatttaggaagtttgtaattttgttctggtggttacctttgcatatataccttttatagagcccttaatcttgttttcttttttttacatgtcattgtcaggtatgtcagttaaatttttttttaatgcttttttttcggcagattctttttattttattttattattattatactttaagttttagggtacatgtgcacaatgtgcaggttagttacatatgtatacatgtgccatgctggtgtgctgcacccattaacttgtcatttagcattaggtatatctcctaatgccatccctcccccctccccccatcccacaacagttcccagagtgtgatgttccccttcctgtgtccatgtgttctcattgttcagttcccacctatgagtgagaacatgcggtgtttggttttttgtccttgcaatagtttactgagaatgatgatttccagtttcatccatgtccctacaaaggacatgaacttatcattttttaaggctgcatagtattccatggtgtatatgtgccacattttcttaatccagtctatcgttgttggacatttgggttggttccaagtctttgctattgtgaatagtgccacaataaacatatgtgtgcatgtgtctttatagcagcatgatttatagtcctctgggtatatacccagcaatgggatggctgggtcaaatggtatttctagttctagatccctgaggaatcgccacactgacttccacaatggttgaactagtttacagtcccaccaacagtgtaaaagtgttcctacttctccacatcctctccagcacctgttgtttcctgactttttaatgattgccattctaactggtgtgagatgatatctcattgtggttttgatttgcatttctctgatggccagtgatggtgagcattttttcatgtgtttttttggctgcataaatgtcttcttttgagaagtgtctgttcatgtcctttgcccactttttgatggggttgtttgtttttttcttgtaaatttgtttgagttctttgtagattctggatattagccctttgtcagatgagtaggttgcgaaaattttctcccattttgtaggttgcctgttcactctgatggtagttccttttgctgtgcagaagctctttagtttagttagatcccatttgtcaattttggctttgttgccattgcttttggtgttttagacatgaagtccttgcccatgcctatgtcctgaatggtaatgcctaggttttcttctagggtttttatggttttaggtctaacgtttaagtctttaatccatcttgaattgatttttgtataaggtgtaaggaagggatccagtttcagctttctccatatggctagccagttttcccagcaccatttattaaatagggaatcctttccccattgcttgtttttctcaagtttgtcaaagatcagatagttgtagatatgcggcgttatttctgagggctctgttctgttccattgatctatatctctgttttggtaccagtaccatgctgttttggttactgtagccttgtagtatagtttgaagtcaggtagcatgatgcctccagctttgttcttttggcttaggattgacttggtgatgcaggctctttttcggttccatatgaactttaaagtagttttttccaattctgtgaagaaagtcattggtagcttgatggggatggcattgaatctctaaattaccttgggcagtatggccattttcacgatagtgattcttcctacccatgagcatggaatgttcttccatttgtttgtatcctcttttatttcattcagcagtggtttgtagttctccttgaagaggtccttcacatcccttgtaagttggattcctaggtattttattctctttgaagcaattgtgaatgggagttcactcatgatttggctctcttttgtctgttattggtgtataagaatgcttgtgatttttgtacattgattttgtatcctgagactttgctgaagttgcttatcagcttaaggagattttgagctgagacaacggggttttctagatgtacaatcatgtcatctgcaaacagggacaatttgacttcctcttttcctaattgaataccctttatttccttctcctgcctaattgccctggccagaacttccaacactatgttgaataggagtagtgagagagggcatccctgtcttgtgccagttttcaaagggaatgcttccagtttttgcccattcaatatgatattggctgtgggtttgtcatagacagctcttattattttgagatacatcccatcgatacctaatttatcgagagtttttagcatgaagcattgttgaattttgtcaaaggccttttctgcatctattgagataattatgtggtttttgtctttggttctgtttatatgctggattacatttattgatttgcgtatattgaaccagccttgcatcccagggatgaagcccacttgatcatggtggataaactttttgatgtgctgctggattcggtttgccagtattttattgaggatttttgcatcaatgttcatcaaggatattggtctaaaattctcttttttggttgtgtctctgcccggctttggtatcaggatgatgctggcctcataaaatgagttagggaggattccctctttttctattgattggaatagtttcagaaggaatggtaccagttcctccttgtacctctggtagaatttggctgtgaatccatctggtccttgactctttttgattggtaagctattgattattgccactatttcagagcctgttattggtctattcagagattcaacttcttcctggtttagtcttgggaggatgtatgtgtcgaggaatttatccatttcttctagattttctagtttatttgcgtagaggtgtttgtagtattctctgagggtagtttgtatttctgtgggatcagtggtgatatcccctttatcattttttattgcatctatttgattcttctttcttttcttttttattaatcttgctagcagtctatcaattttgttgatcctttcaaaaagccagctcctggattcattacttttttgaagggtttttttgtgtctctgtttccttcggttctgctctgattttagttatttcttgccttctgctagcttttgaatgtgtttgcttttctagttcttttaattgtgatgttagggtgtcaattttggatctttcctgctttctcttgtgggcatttagtgctataaatttccctctacacactgctttgagtgtgtcccagagattctggtatgttgtgtctttgttctcgttggtttcaaagaacatctttatttctgccttcatttatttatgtacccagtagtcattcaggagcaggttgttcagtttccacgtagttgagcggttttgagtgagtttcttaatcctgagttctagtttgattgcactgtggtctgagagacagtttgttataatttctgttcttttacatttgctgagaagagctttacttccaagtttgtggtcaattttggaataggtgtcatgtggtgctgaaaaaaatgtatattctgttgatttggggtggagagttctgtagatgtctattaagtctgcttggtgcagagctgagttcaattcctgggtatccttgttgactttctatctcattgatctgtctaatgttgacagtggggttgttaaagtctcccattattaaggtgtgggagtctaagtctctttgtaggtcactcagaacttgctttatgaatctgggtgctcctgtattgggtgcatatatatttaggatagttagctcttcttgttgaattgatccctttaccattatgtaatggccttctttgtctcttttgatctttgttggtttaaagtctgttttatcagagactaggattgcaacccctgcctttttttgttttccatttgcttggtagatcttcctccatccttttattttgagcctatgtgtgtctctgcacgtgagatgggtttcctgattacagcacactgatgggtcttgactctttatccaattttccagtctgtgccttttaattggagcatttagtccgtttacatttaaagttaatattgttaagtgtgaatttgatcctgtcattatgatgttagctgattattttgctcgttagttgatgcagtttcttcctagtctcgatggtctttacaatttggcatgattttgcagcggctggtaccggttgttcctttccatgtttagtgcttccttcaggagctcttttagggcaggcctggtggtgacaaaatctctcagcatttgcttgtctgtaaagtattttatttctccttcacttatgaagcttagtttggctggatatgaaattctgggttgaaaattcttttctttaagaatgttgaatattggcccccactctcttctggcttgtagagtttctgccgagagatccgctgttagtctgatggtcttccctttgtcagtaacccgacctttctctctggctgcccttaacattttttctttcatttccactttggtgaatctgacaattatgcgtcttggtgttgctcttctcgaggagtatctttgtggtgttctctgtatttcctgaatctgaatgttggcctgccttgctagattggggaagttctcctggataatatcctgcagagtgttttccaacttggttccattctccctgtcactttcaggtacaccaatcagacgtagatttggtcttttcacatagtcccatatttcttggaggctttgttcgtttctttttattcttttttctgtaaacttcccttctcgcttcatttcattcatttcatcttccatcgctgataccctttcttccagttgatcgcattagctcctgaggcttctgcgttcttcatgtagttctcgagccttggttttcagctccatcagctcctttaagcacttctctgtattggttatcctagttatacattcatctaaatttttttcaaagtttttaacttctttgcctttggtttgaatttcctcctgtagctcggagtagtttgatcgtctgaagccttcttctctcaactcgtcaaagtcattttctttccagctttgttccgttggtagtgaggaactgcgttcctttggaggaggagaggtgctctgctttttagagtttccagtttttctgctctgtttcttccccatctttgtggttttagctacttttggtctttgcttttggtgatgtagagatgggtttttgatgtggatgtcctttctgtttgctagttttccttctaacagacaggaccctcagctgtaggtctgttggagtttgctagaggtccactccagaccctgtttgcctgggtatcagcagcggtggctgcagaacagtggattttcgtgaaccgcgaatgctgctgtctgatcgttcctctggaatttttgtctcagaggaatacccggccgtgtgaggtgtcagtctgcccctactgggggttgcctcctagttaggctgctcgggggtcaggggtcagggacccacttgaggaggcaatctgcccgttctcagatctccagctgcgtgctgggagaaccactgctctcttcaaagctgtcagacagggacatttaagtctgtagaggttactgctgtctttttgtttgtctgtgccctgcccccagaggtggagcctacagaggcaggcaggcctccttgagctgtggtgggctccacccagttggaacttcccggctgctttgtttacctaagcaagcctgggcaatggcgggtgcccctcccccagcctcactgccgccttgcagtttgatctcagactgctgtgctagcaatcagtgagactctgtgggcgtaagaccctccgagccaggtgccggatataatctcctggttttttaagcccgtcggaaaagtgcagtattagggtgggcatgacccaattttccaggtgccgtctgtcacccctttctttgactaggaaagggaactccctgacccctcgcgcttcccaagtgaggcaatgccttgccctgcttcggctcgcgcacggtgcactgcacccactgtcctgcgctcaccgtctggcactccctagtgagatgaacccagtacctcagatggaaatgcagaaatcacccatcttctgtgtcactcacgctgggagctgtagaccggagctgttcctattcggccaccttggctgcccttcccgaaaaaacaaaattttttttttgttttaataagtgagcttttctatgttcctattctttccattattttctctccatccttcccatttttagttatatattttgctttgacagaacatgaagtatttacatactatgcttccatgcgtatcccgtttttgtttttgtcttatagctacaattaagtatattaaatatcccacaagtttggtggcttaaaacaacagaacttgatttcttcccagttctggggtccagaaatccaaaatcagtttcactaggccaacgtcaaggtatcagtagggccacactccctccagaggagaagctgctctggaagagaatttgctccttgcttcttctagcttctgaaattgtggctgcagcacaccaatctctgcctcttgtcttcacatcatctcctctgtgtgggtgtcaaagatcttcctctgtctgtttcttataagaatgtacatgaaatatgaaaaattttttttaaaaaatatgtgattgcatttagggcctacccaagataatctccccatctcaagattctaaattgtatctgaagaggcttcccctaccccttttttgccatataaggtaatagtgacaggctccagggtttaggacatggaatatcttcaggcattattatttagcctaccatggtccttccagtgggccccaaagatccatcccaatatccttcaattttcagcttcatttcaagttcaaaatctcatctaaatctcattagctcaaaagtcccaaatctcatcatctaaatcagttatgggaggactggatagaatccatcctggtgcaaaattctccatttgtggtcctatgaaactagaagacaagttgtctgctttcaaaataccatgatgggacagacataggatgaaagttatagacatttccattttacgagggaaaatcaaagaagaaagggatcagcagttccaagcaactttgaaattcattagagcaaatactattaggacttaatgctctgtgacttgagtctttacccttctggatccatggctcttccctctgtgcctgtggctctggctttggcctctgtgcctatggatctgcagctctggccacatgttctcacttacttctgggagctaaaaattaaaacagttgaacttaggaagatagagagtagaatgatggttaccagaggctgagaaaggtagtctgtagaattttttgagtctagcacccttccttcatttcatcctgtctttgtgtctttcaatttaagctagcagtatttctgttggtataacattctcaaaagatcttgtgtcttgcatatgtcatggtcatctactccatagacaggtctttcctggaaaatcccatctttattgttagcttcttctgacatcatttggaggatccatgaatcacatgctttatctcttcagaactagcaaaaggttattcagccacactcttgcccttctctccagaatatgctttcctaacagcgactttactaatcttttgcaatttggacaggctgaaaacttctcaaaacatcaagtcctggttccttttgcttaaagtttttcccaccatttatctctttgttcttgcttttatactaagcctccagaagaaggtaggctgtaactttagcactttgagaaatagacaaatgagacagttgaaaattaaaatatcaaccttatcagtgataaaagtgtttatagcataacgcttagctctgtaaccaatgtgcttgtaattactaacccctaaactgcagcatctcttctcactctatctagcccctccctgacacacagggacagagtatgctgtggtcaatttacttcattgatgagcagagactggctgctctgtggacaggctcctttgtaggacagagaaaccaaaaggggctgagccatatatgcttaattactttactctagagaaagagagaggaggatggagccataccacaaaactgcagaaagggcaaacatacctatgttagggaccaaggtaggtaggaaactgggaggcagatggaatgattctttctaacactaaggtgataggcatttttgctatctacctgtcttatcagttatagtgaatagtgttttttctttgactatgaattactaaaagctccttcaaatcaaacatgtaactatttgaacagtttaaatgatagcacctattttttatataaattaatataatatacatataaattagatataaatataatttaatttatataattaaattataaattaaattacatgtaatatagaatatattttataattatgtgtaattattatataattatatataattaattatataatttaattataaattataattaaatttatatgcatatttatatataaaattaaatttataattatataaatataaattataataatatagataatgtaaatataaattaaatgcctgctatcatttaatttatatttatattatattaatttatattataattctcatgtagcttattgtcctgtaatttataggtttctccaacaactaacagaagagaattttgagttaattagtaagttgtggactgacattcagcagaaaatagcaacccagtcacaaataactcctccaggaacgccatcatctgctctttcatcaggggagcaaagaggtttgtttcccttttgcattatttctaggtgcctgctttattaggttcattcttgaatgcagtaatttttgaaggaatgttatttgagttttgactgcctttgcctaattgactaaaatactgatggatctgtcaattgaaatactttcttaagaagtttgttcacttgagatacttttggaaatgttcttccttttagctgctctgaatgctaccaatgctgtcaagagactccaaaccaggcttcagcctgaagaatctactgagactctagactcaagctacgttgtgggacacgtgctgaactcaaggaagcaaaaacagctgttaaataaaggttcagtcccttaatttacaaagatgaatattaaacatgtaacttgatacagctgtcttaatctcttagtcaatgtttttctcccttaatctcatccacatggttccaactgaaagtttattgaatggtagctaagaaatgtctcctaccacatgtaactctggaacagtggttctagtgcattcattatagctagtgtaaatctggtttaaactgtttaatttttatgagagaaatggtgatatcgtctatacaagccttttataaattgtgaacaatagtcaaaagatttttctagtagttttctagtcataatttttcctggtcttaaaatagaatgacttctctcattatcagtgaaaaggaaaccgaatttgcatgctctttccaagccgaagaaaaacatatcatcaggtagcacaacctctgcagacttaccaaataggactaattccaacctggatgtcctcaaacacatgatacatgaagtggaacatgaaatggaagaatatgagcggtggacaggtcgcgaggtcaagggtctgcagagcagtcagggtcttacaggcttcactttgtcgctggtgagctccctctgtcgcctggttcggtaccttaaagaggtaaggacattaggttagtagagtcttcttttcaggcagaaatgcatgagttttttttcctttccatttattgcaacctccaaataaagtacagtcaaatttgaatagcttcgtttaaaatacctcagttttagattatctgcagtaaaggcttatcctttaagtcttttctgccgttagttgatacatgctcagataagtgattttaattttaataagagctttagcaaattataattagtagggtaaatctgccattaatataattatatcttgtgctaatattaaatattactgtttgacagttgtagattaaatagaactgttaactgtgtctgcattctattgctattctctgcttcctactcccacattcagtttggagagtggcattgcctataatcggtagacttgatatgtgggagaattcttcatgttccctgtatgtctggtaactcacatatggcttcaatgtctaagtgggagatgttttattgttgtaaaaataatttataaaataagcaagaattctttgtttggctgggtgtggtggctcacgcctataacctataatcccagccctttggaaggccgaggcgggcagattgcctgaggtcaggagtttaagaccagcctggcctcaacgtggtaaaaccttgtctctactaaaaatacaaaaattagtcgggcatggtggcgggcgcctgtaatcccagcttctggggaggctgaggcaggagaattactttcaccagggagttggaggttgcagtgagccgagatcgcgccactgcactccagcctgggcggcagagcaagacactgtctcaaaaaataaaaataaaaaaagaattgtttgtttaatttgatttcaaataatcatccacagaatgccacagaattagagttagctatgtgtttcatctttgaaaatctatttaaactgttatgtacttaagcctgttatacaaatatgacaaaaatgtttaaggaaactttattatttaataagatagatttaccaccttaatacagatgttttagtttctctagagccgtcttcctaaaattgaattgctttttttttgagacagggtctcattctgttgcccaggctagggtgcagtagtggcatgatctcggctcactgcaacctccacctcccgggtttaagtggttttccagcctcagcctcccaagtagctgggaccacaggtgcatgccaccacacccagctaatttttgtattttttttgtagagacagagtctcactatgttgcccaggctggtctcgaaatcctgagttcaaagcgatctgcccaccttggcttcccaaggtgttggtattataggcgtgagcctctgcacctgaccctaaaattaactttttaatgacagattcattgtattgtcagacctattaaaaccttaacattctttcacccttaactcaggaatcttcaggagtatacttttggctcttggagagtattgcaggcttagaagcatgtacttttttttttttttttgagacagagtctcgctctgttgctaggctggagtgcagtggcatgatcttggctcactgcaacctctgcctcctgggttcaagagattcttctgcctcagcctcttgagtatctgggactacaggcgtgcaccaccacgcccagttaattttcgtatttttagtagagacggggtttcattcaccatgttggccaggatggtctcgatctcttgaccttgtaatctgcctgccttggcctcccaacgtgctgggattacaggtgtgagccaccacgcccgaccagaagcgtgtacttttaagctaatcacttgttttacaaagttaaaccatttaaagttgtagtcatttactttaaattatattttaacaagcttaatttttgaattggcaatatagtcacatattatgaaattcaaagataacagcagattgtactaactctcatgactaacttccagctagcctgtttgcttatttatagccaactatcattccagataccagtgtatctttctagagatggtcagtgtatattcaaataatatgtatatgtatatccctctactttctttttacaaaaaatgtagttacttaattttatatagcatttagttcattttattctatttaaagaagggaagaggataaagaagcacattttctttaattaaatataataaaccttttaataaaactcttcatcattactgtcacataatatatgcttctttgtaaatatcttctttgccagctttgagtgcaaacttttagttttcaacatgtgatgctattggtggaagtttatttgatatttttttgtagagtgagatccagctacgtaaagaagtagagacaaggcaacaactggaacaagtattaggtgatcatcgagagctcattgatgctctgacagctgaaattcttcgtcttagagaagaaaacgctgctacacaggtactcagatgagatcccaatttttatgtgttcagtggtataaaacatctttaaacatgtactggattctcttagagttgcttttggtttaactgtatcgatgtgattacttatcagtcatttttatcatcagtggcaggtattattgaacatttattacatggaagtactatagtagaagcttggaagtagtatatggactgtcttcctgtcttcaagagacttactatttagtgggaagacagagtctacatttaaattataactacaagtgttacagtagttaatccaaaatgtgaaatgagtgttatgacagccacttttaatttcaaaacagcagaaggtagcctttgaggagtccttttgcaattatatcagagccatttacagttgttcacagtatcttcatatttgttacataaagtcctctttgctgcttgactaattgctccttttcttttttaaaagacttacaccattctcttctggaaaacctattgcttccatgctgcattgagcattcttcctttgtgaacttttttttttttttttgagatggtgtctcactctgtcacccaggatggagtgcagtggcatgagttcattgcagcctggacctcctgggctcaagtgatcctcccaccttagcctcccaagtcgctgggactacaggtgcacaccaccatacccagctaactttttatgttttgtagagatggggtttcaccatgttgcccaggctggtctcgaactccagggctcaagctattcgcccgccttggccctcgaaagtgctgggattacaggcatgagccactgcaccttgcttctttgtgcacttctgatactgtctggatattggtattattgcatttatcaaattgttttatacttatatgtgtacttgttactgagactgtatgcttcttgagtgtacacagtctattttattcatcttttttgttctcatatgatggttattattacttttatttatcagccagaagagactagacaagtaatagttagaagataaattatgtttgtgttaatggacattagatgtagatgtataattttttaaaattgataatatagggcgaggcgcagtggctcacacctttaatccccacattttgggtgccaaggtgggaagatcacttgaggccaggagtttgagatcagcctgggtaacagagtgagacctgtctctacaaaaaataaaaatattagctgggcatggtagcatatgcctgtagtcctagctgcttgggaggctgaggcaggaggatcacttgagcctaggagtttgaggctgcagtgagctatgattttgccattacactccaccctaggtgacagagtgagaccctgtctctaaaaaaaaaaaaaaaaacaacaaaaaactgaaaccacacacaaatttgataatatagttcacataccattaagtcctccacccttttaaaatgtacaaatcagtgtttttagtatgtttgaagttgtatgccagcactgttatctaaatccagaacattttcctcactccagagagaaatcctgtaccctttttctttttttttttgagacggagtcccactctgtcccccaggctggagtgcagtggcatgatctcagctcactgcaagctctgcctctcgtgttcacgccattctcctgtcctagcctcctgagtagctgggactacaggcgcctgccactacgcctggctaattgtttgtatttttagcagagatgaggtttcaccgtgttagccaggatggtctcgatctcctgacctcgtgatctgcctgacttggcctcccaaagtgttgggattacaggcatgagccaccgcgccaggccatcctgtaccctttagaagtcactcttcattctctcttcttgccagctcctggcagtcactaatctactttttgtgtttgtgtatttgcctaatatagatattacatagaaatggaataatgtaatatgtgcttttctttcacttagtataatgtttaaggttaatttatgtttagcatgtatcagtacttcattcctttgtattgcccaataatattccattgtatggatataccatattttatttatcctttcattagttaatgaacatttgggttatttttacattttgtctgttatgaataatgctgctatgaacattcatatacatatttttgcagaacatatgtttaattctcctgggaagatgtgcagttttaaaatgtactaatttacttaacaaatctttgttgaacacctgctgtgggcctggtactgttctaggtacaggaaatagaatagtgaacaaaatatagaaaactttgccctcatggagcttacattctaaataaatcctaaaaacaaaaagttgaagtatagtaagttagatggtgatatgtactttgaagaaaaataaagcacataaaggcacaggaaatgcataggatggggtaggatgcagttacaaatgagatgggccatgcctgtctgaggaagtgacatttgagccaagacctggaagaggcgaggagtgagcatgtgggtagctgagagaagagcagtctgggcagaggaaaagcaagtgcgaaggtcttgcggtgggagtgtgactggtgagcttagagtcatcaaggagatcagtgtggcaagagtagagtatgaggaagaggaagagagagaggcaggagacaagatcaggtaagcccaattacatagcgccttgcatgatggttaaagatatgggcttttatgctgagtgagatgggaaaccactaaagagaagagacgtgatttgtcttgggtttaagaggatcactctgggctgtgttgaaactagatcagagattggtgccctttcttgggtcgcgtgcccttagtgtcttataacaaaacagttctactaggccaaaaacagttctacttactaagttgttgagtccaaacaactatgtcctaacaactgaggggctgtttgagaaaaagtaatactttctcttaaataactacaattatttactaatgggttatatgtaccttttgagcactgtaccacttctcaaagcttggaatcatgtgggacacaatcattcttatttcctgttccacactgattttcctccagaacttgtttttttaacctagcaactgctgaaaacccagccatgagaagatttgacatcctcaaaaggaatgtaatggaatctgacattgaaattgtgaactgtcctgagctaatagttcaccagtgtctgatagatggcaggcatcactatttcccttgaagatttaaattttccccggtgcccctgtaagttcactttagtgccctgaggtgcctcagcaaacagtttgggaacagtatgggactagagtaggtggccaaaaagcagaatattacatgaggagttattggaatagttcaggtgagacatggcagcttggtctagggtggaagtgggagagggtgtgaaaagtgatcaagttatgaatatattttgaaggctgaccaatgcagtctgctaatttattggatgtggagtgaagtagaggatattggaaaagagtcaagggtaattccaaagttttggactgaataattaaaatgatgaagttgccatttatgaggtaaacaaggcttgaggaggaatttggctttatgtatcttaagtttgagaagtctatttcagttctagatggaggtgttgagtaggccactggatatatgagtgtgaaatttgggaaaaaatttgggctggtggtataaaaatgtttactatacttcattcagcagtactgttaataatatttctgagtctggctgcacctgacttttatcaaatgtctgtatctctctaagcatacatgagagatatatatatgcttagatagaagtttgttactagctgccatctttgggttttcttactttgttattattacagagtgtcagcaatttacagaactctccttttgttccttctacctgcaatcttctctacttctaggaacatttgtgtaacaccaatacataacttagatgagcattatgtggtagtgatcaaacctgatgtttttagatgacatacttgtatcatccttgtagagaagattaagaacaaaacaaattcatctaaccttctgggcaatctgtttgacttttacatgtaagaatggaattctaaacactgaacacattcagctctgtgccagaaagtaaatctatgggtatggtattttgtgggtgatcttttaaatatagaaaaaaaaaaaccttatgtaatattaaaaatatatatatatacacacacacatatagacaaagatgagaatatctatatacatatataaaatatagtgttatctctctcatgcacgtatgtaaaaatcaagttgtaattaatatttatattaattacatacagaattttgtgctgttcatgtttaccagtttaaatgcctgggtaatattcattgtttcctccacctcatgtatctgtgtctcttgggggtagtttaagagttagttgaaacatctatatgaagaggttttgtaaatggaaagccctgtagaaaggttaattcttattgttatagcagggtatttattaattactgtttcatgatttacttaaccatttccctatcatggaactattagaatatttataattataaatagcattgctttaatttgaagtctcaaattcctgaagtatttaaaatgatgatattatacatacatatcctttgatatgtattgatatgatattaaacacacgtatcctttgtgtggtttgctttctaggtggtggtttgatgtttgatatgctaataatattatttcatatgttttcctccccaggcaagacttcagcagtacatggtcacaacagatgagcaactgatatcactcacacatgctattaagaactgtcctgtgataaataacagacaagaaattcaggcatcagaaagcggagccacaggtagaagagttatggacagtccaggtgagtgtggtcttactctctcagactgtcattagactacttaatggccttagataacaaaccaaaccttaaatctctaaacttatatagacttattgactgtttatgcatgtacagtattgtcactactacagttgccactacttttccagctaatattggatgcatgctctatgccagatacttgttaagtcttacatgcataatttcaattcgtgtcataatagtctgatgaggtaggtgttattgttatccccattggtgttatccttagaggaaacaggctgagagagggttggtaacttagcaaagtcatacaggtagaaagtagcagaactggacacctagaccaaagagagtgctagcacttttaatcccagtgctctagatttagaagagatggttttggaaagagaaaaatactgagttttagaaattcataacttttgttcatgtgtgatagtgttgttattttgaaattcttccttcatctcatgtgccatcatatgctataggctgaattggacattttggttttttcatgtgttttacttttaagtaagactttgatgagtatctgtaagaaaagtgttttatgtatttaaaaccgttttcttaggatggattctaagaagtggctgaccaaaatttaacttgcatgaggtaaactcattggctagggcacatctctgtcttctggtggagtcttgctattttttttttttttttctttttgagatggagtttcgctctgtcacccaggctggagtgtagtggcgccctctcggcttactgcaacctccgccttccagtttcaagcgattctcctgcctcagcctactgagtagctgggattataggcgcctgccaccacacctggctgatttttgtgtttttagtagagacggggtttcaccatgttggccagcctggtctcgaactcctgacttcatgatccgcctgccttggcctcccaaagtgttgggattacaggcgtgagccaccgcacctggcaagtcttgctattaatatctcagtcaaggaatatgttagtgttttactattatctgaattaagcttcactactgagaaagcttttaattatcctataggtaagaagggctgggagtaaatatattgtagaattattgtttttttttgttttgttttgttttgttttgtttttaattttttttagtatttattgatcattcttgggtgtttctcggagagggggatttggcagggtcgtaggacaatagtggagggaaggtcagcagataaacatgtgaacaaaggtctctggttttcctaggcagagggccttgcctccttccgcagtgtttgtgtccctgggtacttgagattagggagtggtgatgactcttaacgagtatgctgctttcaagcatctgtttaacaaagcacatcttgcactgcccttaatccgtttaacccttagtggacacagcacgtatttcagagagcagggggttgggggtaaggttatagattaacagcatcccaaggcagaagaatttttcttagtacagaacaaaatggagtctcctatgtctacttctttctacacagacacagtaacaatctgatctctctttcttttccccacatttcccccttttctattcgacaaaaccgccatcgtcatcatggcccgttctcaatgagctgttgggtacacctcccagacggggtggcggccgggcagaggggctcctcacttcccagacggggcggccgggcagaggcgctcttcacctctcagacggggcagcggggcagagacgctccccacatcccagacgatgggcggccaggcagagatgctcctcacttcctagacgggatgatggccgggaagaggtgctcctcacttcccagactgggcggccgggcagaggggctccttacatcccagacgacgggcggccaggcagagacgctcctcacttcctagacggggtggcggccgggcagaggctgcaatctcggcactttgggaggccaaggcaggtggctgggaggtggaggttgtagcgagccgaaatcacgccactgcactccagcctgggcaacattgagcactgagtgagcgagactccgtctgcaatcccggcacctcgggaggccaaggctggcagatcactcgcggtcaggagctggagaccagcccggccaacacggcgaaaccccgtctccaccaaaaaatacgaaaaccagtcaggtgtggtggcgcgtgcctgcaatcccaggcacttggcaggctgaggcaggagaatcaggcagggaggttgcagtgagtcgagatggcggcagtacagtccagcctcggctgggcatcagagggagacgtgcaaagaggagagggagacgggagagggagacgggagagggagacgggagagggagacgggagagggagccagaattattgttaattcttgttattgcctgtggaaaaagtcagaaagatttatgttggtgagaccaaagatttatgtaatatcttcctgagtctcagctcttgtaactcttttaaaatactatggaatgtgactatgttgtgataatgcatgacctgtgaagttccttgttttgtaatgagccttatatatggaggtcagtgcattaatatgacccattttagccattttgttacttgtgatgaccattaaaaagctatccataacaaataatgaaaaattctaccagcctaggcagcatggtgaaccccgtctttacaacgaatacaaaaaattagctgggtgtgatggtgcatgcctatagtcccagctactcgggaggctgaggtgggaagatcactggagcctgggaggtcgaggcttcagtgagccaagatcgctccactgcacttcagcctgggtgacagagtgagactctgtgtgaaaaaaaggaaaaatggaaaagacaaactctggaatgccacataggattttttaggagtccctaactggctcgcttttcatggctttgaggccttagtgattttctcaaaaatagtaacttctcagtactagccccccaggagcctgcccatgaatgattggcagaggaggatacagcctagaaagtgaaggctccaggagctatgttgattcatgtggattttgcactctactgagatgcatttaagaataaatacctgaaatgtgctcatagtttctttttgttcctattgtactaatatcctctcatcttcttcagagcgtccagttgtaaatgccaatgtctcagtgccattgatgttcagagaggaagtggctgaattcccacaggaagagttgcccgttaaactgtctcaggtgccagaccctccagataacatgaatctggccaagaattttccagcacatatttttgagccagctgtgttgttaacaccacccaggcagaagagcaacttaaaattctctcctcttcaggacggtaagtcttcttctaaagttacatgaaagttgttttttaatgtttcatttgtgcaatgtattactttcaccattacatgaaaaacagaattgaaaaagacactgattaccacacatagcctttaagctgaaggaagaattttcatgctatgtgtatcatacctgtggtcatgtgtgacatttaattaattttattgtatatctattttattaaacattgtaagtattaaactcagatcaaaagatcagagtccttagcattaagatgcagagtaaggggaatcccttttgtccctatggtccaggagcatttcaaagagttagaagcaggagattatactccaaagagtaatgaaagttagactaaggaaaggtgaaaactgtgactttaagggtcttgtaagtgacatctggtcattatattcacctctttctcatcaaaagttttcagctcagttagttgaggcaattttataataaaagttaatggacaattaaaaatagctttagagttactcttgcagctcacaggtagagttttgaataaacatgttaagaatatattattcttagctcaaagattcttaacttagggttcatgaatggtcttcagaagttccatggactacctcattgttgggaagattaaatttatttgtccccatgtacattttttctggagctattgtttttatttcatttttaaagaggtctttagtcaaaaaaagaaccaccatcttaaactctcttccaaagttttttgaaaaatattattcaggtctgattagcctgaatttttatttctttgacaagttttttttttttatttttacacaggggaacagaaaaataactgtttattattattgggacatacaaattttgtgcaattttctgcactttgatgtatgtttccaataaaggacacgaagaagcccaggggttaaagaaaatggcaaatccttgctattaaaaattctgttttggtatttataatgcagatgtagcatttgtcagatcagtatggtgcaatggtgacagtgccaggctgagagtcagacgtgctggtatcttggcccgtttattgttgactagctgtgaggcatgaggctcagatagtttaccttttctagacctaagtttttccatctatgaaatgagaagatatttctttatctttaatgttccctccagctctatcattgtatgattcagtatttcctcttcagagggcttcagttacaataaatatgtttactctgatcacaaccgtactaaatgcttgttaaagcaaatttgtcagggattgctatagacaacattttgttaatatcttcagcaagtttgtatttaaaataactgcccatttattttataatgtgcagacagctgcttgtgaatatgtatttgaattggtgatgttttattatatttttcaagcattgtttggaatactcacatataaagaattattcagttaaacagaatatgcagatgaaaatgggtgatacatagggcccttcatcagcattcagttctcttttaggatagctttgtctaatagaattttctgggttgatgaaaatgttctgtgtctgctccatccagaatggtggccactggctgcatggggctagtgagcacctgatatgtggcttatgtgactgagaaactgaattttaaattttatttaattttaattaacttaaatttgaatagccacatatagctagaggctgccatattggacactattgctgtagaatttcccatcataaatattttcctctagctattgatttatttctgcttttctttacagccatgcttcttgaacgagtagtgggtgtgtgtgtctgtgtgtattggtgtgcagtttcatttcattttctgatctcccattcatcctttattttaaagcgttcattcgaattcatatttgtatatggttttttaaaaagtactgtcaatttaacccagagaaaggctctctaaaagaaactgatatttatttgagattgagaattgcaatgggaatatggtgggcatattcagggaagtaaaggaagacaagagtttttaaaggggaaatgaggaggattatttaagttgttttgagataactatccttggctacaaggatcaataacaagggtggcatcagtctaaggttggataggcagatgttgggcaaatgtcctcgcagaattattttttgtgtaagattgtggtgtcctttgtgcaaggttctggtttttgaagtctcttgaacagttcttgttatcagtcatacatgcctgagaacccttccttcctggctttttaaggctccacttatcagtcacttgtgtctgataaagtgactctgataaagtcacttgcgctctgacacaaatgtctgatttttttttttttcctttgagatggagtttcgctcttgtcacccaggctggagtgcaatggtgcaatctcagctcactgcaacctctgcctcctgggttcaagctattctcctgcctcagcctcctgagtagctgggattacagccgtgcaccatcatggctggctagtttttaaaatatgtattattagtatagactgagtttcactatgttggccaggctgatctcgaactcctgacctgaggtgatctgccgaccttggccttgcaaagtgcgggtattataggagtgagccaccgcgcccggccaaatgactccattttgattctgacagctttcacagtacatacccctaaaggcagtcattttctgcctgtaatgtcctttgctcagttcctattacatatgtaatcatttaaaaattttacttcctcagagaggcctttcctggttatctgctgtttaaattgggtacttatacccacttcctcattccccaagattcccagatgtgagttaatatatgcgttaaaatgtgaacttgacagatggtttttcacaagggtactaacaaatgctttaaggaatgtaaaaagtctctgtacttgattacgaggggcggcattgctggtgtgttctctgctgaaaatagtttaagcattcagaagccaaacccttctactgaaatacttttctaactaccatggtgggctaatgaaatgagtatagtgccaatctatgggaaaataatacatatttgttatttttaaattcttatctatagtattgagaaggactgttcaaactcgtcctgctccacgacttcctccaactgtggaaataattgagaaggaacaaaattgggaagagaagaccttacctattgatacagacattcagaattcaagtgaagagaatcgtctcttcactcagagatggagagtctctcacatgggagaagatttggagaacaaaactcaggctccttttgttaacctctcacagcccctctgcaattcccattccaacactcaacagtcaagaagccccacattctcagaagagctcccagtactgggagatgggcagcagctgagaacaaatgagtcattaatacaaagaaaggacataatgacacgaattgctgatttgacattgcagaattcagctatcaaggcacatatgaataatattattgagcccagaggagagcaaggggatggactccgggagttgaacaaacaagaaagtgcaagtgacatgacttctgtgagtaccatttaaggattgattagggacatataggaatttaaataggaactttagcttgggcaacttaagaaacttcttttcagaagtgatcctagaaagctttgaggctagatggcttatgtttggcatgtcctcaatacaataggtccaagttatttatcagtctgttgtacatacaatacaagacagcataaaagggaaattatataaatgaaaataggacaaagataaaatgcgtaggaaagctaagattaagttaggaatgaagttttaggtataaaatatagaattaatgttacttgaatgtttgccacacagccacatgttaattgaaaatatttttatttttaaaatggctcataaaagagtattggccctcaactcatgagtagttaatttttgaggacatagaatggattttcctatagaaatgaggtggtttttttgttttgttttgtgtgttgtttgtttgttttgttttttttgagacggagtcttgctctgttgcccaagctggagtgcagtggcatgatctcggctcactgcaacctctgcctcccgggttcaagtgattctcctgcctcagcctcctaagtagctgggattacaggcatgcaccaccacacctggctaatttttgtatttttagtagagacggggtttcaccatgttggtcaggctagtcttgaattcctgacctcgtgatctgcccgcctcagcctcccaaagtgctggaattacaggcatgagccactgcgcccagcctgttttgtttttttgagatggagtctcactctgttgctcaggctggagcgcagtgacgcaatcttggctccctgcaaccgccacctcctgggttcaagcgattctgctgcctcagcctcccaagtagctgggattacaggtgcgtactaccacacctggtgaatttttgtattttttgtagaggcggggtttcgccatgttggccaggctggtctcgaactcctgaccacaagtgatctgtttgcctcggcctcccaaagtgctggaattacaggcatgagccactgcatctggccagaaataatgttttaaaggattattaaagccagactttaatatacatattaatcatctggggatcttgctgaaatgtggtttctgattgagtaggtctagggtaggacctgtgcatttctaataagttcccaagtgatgccagtgctgctagtctgaggaccacgctttgagtagcaaaggtctgcattttatagtgcaggagttttgtaagttaaataaactttgtgggctaacctggtaacttaaaccttcatttcgttgtttctgggggagatagggagtctaaattccagctagggagggtttataaaagagctccaaatgctggttccagtgatggtagacactttcttttaccccttctagagccaaggccgctcctgtcaagtttctgataggaggagctgggcactgtcactggggattagaagctcgtgaggtggctgtgttcataagggctttaacaacagtgggttggagggctttggtgaggaaggttagggtgaggtgagtcatagggtaagggccatctctgtcagcactgggtcatggggaataaggacaatatgggtattgaatcatagaagtagacagaaggaactggcagaagaggagccagaaaggaatattgctagtagggagcagccagccattggtagtggtgtatataagtaaatatcaactgcctcaattttgagtcactgggaggcatttatatatttgtagttttgaagattattcataacaggcaactcttggtttaaaaaagacagcagagtctaatgttttgcttgcctccttttctaattagtatgtagatcaagctggaagggactatctaatatttctgtcttcactaccctcttttgttttaattggaaatacaaaatgatctttaattcatactgattttcctatttatttatttatttattactaatagacataagctaaaaatcagtgatttttattagggattatttttttccaaagagaaatgaaataactaggactgaaataatgacataattaggaataatgaaataattaggaatgacataagcacatttggggggggaattttcaaattaaatttatgctatattttttgggcggctattttttaccctacctctcatatttctttccaatcaccaactattcttgaatcagataccttaggccaaaagtggcttggggaggctgacatatggttagaaggagtgacaagattcccagaatctttgccaaatggtgcatatttgaagcctgtaattatagaaacttctgtttccaagatagcagatcctcttttgtaatctgtcaaactgcagatctgtcttcaaagatgtgtggcatttacttagagaccagctcacttggagcagtctctttgctcatgtgatcttttgtgcagctctgcagatactaagagatacagaaaagcttttcccagaatatatgcttaaagggactgtaaattctattgtgtgctcactattcacatttatatataataagggctatgaatactaacttgctggccattagtaagtcaaaattgtgtgagatcgaggtgggtggatcacgaggtcaggagatggagaccatcctggctaacacggtgaaaccccgtctctgctaaaaatacaaaaaattagctgggcgtggtggcaggtgcctgtagtcccagctactcgggagactgaggcaggagaatggcgtgaacccgggaggcagatgttgcagtgagccgagatagcgccactgcactccagcctgggcaacagagtgagactctgcctaaaaaaaaaaaaaaaatcgtgggagagatttttcagtattcagtattcaatttgtactttttttttttttctcccaaagacttttccagtagcacagtctctaacaccaggtagtatggaggaacggattgcagaattgaatcgacaaagtatggaggctcgtggaaaactactgcagttgatagagcagcagaaacttgttggtttgaatctttctccaccaatgtcacctgttcagttacctctcagagcatggactggttggtcacaaattcatgatttaaaaactagaaatatgaaggttttcagttttcttgattttgcaagtttatattaagccaaaagaagtatcagagcatatattttggtgccttcaattttgcacagaaagaaatagccctaactcacaggataagtgacagaaatgggattagaaggcagatctcctgattatttctatcctatgatgcctatagttaatctttggtgtctgagttcctaaattatcgtacatctaaatgggattcattatagtgtacggttcacttaggtcatatgctgcaactaagcatgaaatatctgaatgttcatttagaatttcatcagcaatgaattacaagttattattctgtaaaacacttaaaacattttcactcaattaaattttttgttacatttaggaatgtgaaaagctagaggggattctgaataataaaatagtaactgaaaaaattgtcatagtattcacattcaaaaagatactgatgaaacgaagtatgtatcaagttgctttttatcagaaattgcattattaaggccctcaagggacagctacatgaagagtactgagagattgattttggcccagtaaaagagaaggctctaattgtcaggaatagaaaaagctccatgtaccagtaattgatgtgttctctgagatgttcaaacattggtgtttgaaggggactcatatgtcttatttctggttgaagtaggttacctttaagataccttccaataagacttttcccctcagaaattatttcctttttgaaatacagacccagaaagcagactcttttggaaattgctggaaaaagatggtaatgcatttccccagggctctctgtttattctaggcttcctcaaatgacagttttgtctactgttcttcatagttatgaagcctagagacaacttctgattagaataaataaatcaattaactatatatgaacatgtactatgtgcgaacatgtactatgtgcgaacatgtactatgtgcgaacatgtactatgtgcctgccatgtgtgggcttgaatactctagcatttgagtaggggagcaggcaacaaacaaatcaatatttgggataatatcagttagtgctaagtgcaaggaagaaaaataaagcagatcagccttaagaataattttgtgtttaaatatacatcttccatttcagtatttgtgtatggttaaaatatgcttttatttatgttatgtaatttagtcctcaacatactttaagaggagacagggctaatattatacctatttgatgaataagtaaactgaggtacaaagaggttatgtgatttatcaagttacaaagcaagttgtggatttgcaactgcgttctttcctgtccagtgatttatctctaaagtattctttttataagtaaaattcttatatttgtttaaaaaaaagctgctgtggactataatgataaaaataaaaataaaccatatatcatgaaaaacctcttttgttttctagggtaactgaggaatattttgtaaaattaaatagggttttattaccttgtaaagccaggaagtcacacaaagtcaggagcctctgtgaaactgcctgtgatgaacattaagtctttcattagtaaatacttagtaaatatgctgattgattacctacttctgaaatatggaaaatattcataattatacttgctattggccatatggagctcttcagccaactttcctctcctactttaatgtcttcagtaatagtcataatgtaatcgatttaaaagatttaaagttttactgaatgacttcagaaattttctttttcctttttttttgggaaaactttaggtaagctcttttggacaaagatctcaagctctttagggctagctcttaattcctgtttttcacctccagagctgacatgatgccacttgtctgaagattttggctctctatgaactggcatgctactgaattaacactagtaactaaagtttcttatcccacagttcagtaaaaaaaaaaaaaagtctttcaagtgtatcttgggctaagattaaaacagatggaaagaaccaccaaatttttaatgtgcagtttgcagtaagatagaaattgagtgaaatttttatttcattgaaaggtaatggaactaatatttatttttatattttagaaggagcaaagaggacaattgaggtatctattccaggagcagaagccccagaaagctcaaaatgtagtactgtctctcccgtcagcgggataaatacaagaaggtaagttgcagtgtgaatatttatttaaaaaaaaaaatcaaaaagaatttggtatgtattttattctctttgtgaaaaaaggaagtgtacagtatctgacttaggttgagacagactcatgcaaagagagtaaaataattggaaaagagaattttgaggggaaatggagtgaggaataaactttaagtagaaaggcatgggtttgctactgaaaacaaaagtgagataacacgtatgtagagtacttacgggttacaaaattaggagatgatgtatgacaggacagctgaattgaccaatagtattttcctccttcacagtaaatgaaactgaagctctccgagttaattgggtgatttgtctagatgggtcatatgattggtaaatagtgacactaaggacatacctggcctttctgtctctactctgcatccttactattgtactgtgctgttccaggtcgtgttactcttctactacctggacctttttccccatccctgcacgttctttttctctttattattgaaaatttatccatataatattgtaatgccagatacatgtcattatacatttgtgaaaacccacagaatgtgtaacacagagagtgaaccctgatgtaagctatgaacttcagtcaattatatcaacattagatcatctgttgtaatagatttgtcacactaatgcaagatcttaataataggggaaactgtgtgtgtgttggaggtggggggtaaggggcatatgggaactctgtactttccactcatctttccataaacctaaaacagctctaaaaattaaattatatttgtattagtccattttcatgttgctgataaaaacataactgagattgggaagaaaaagaggttgaattggacttacagtttcacatggctggagaggctttaaaatcatggtgggaggcgaaggaaacttctaacatggtggcagcaagagaaaatgaggaagaagcaaaagcagaaacccctgataaacccatcaggtctcatgagacttatttactatcacgagaatagcatgggaaagaccggcccccatgattcagttacctccccatgagtccctcccacaacatgggcgaattctgggagatacaattcaagttgagattttggtggggacacagccaaaccatatcactattaatgaacaaataaagacttacaggttggtgaaaataagttacaaataatttacctcgttggacctaagttagccatatgttttcaagctcttgccagtattgagaattgtcagttgtttgcataatcttttaaggttaataatgatagctcactctcttactctgttttatttttcatgaatagatcttccggggctactggtaattcttgttctccactaaatgccacctcaggaagtgggagattcacacctcttaatccaagagcaaaggtacacgttaaaatgtaattgtgaaatgcatataggggtgagggtagaaggtggctgatttagtgatttccattcttaattatcattcctgttatcctaaagctggtatgatattcttaaaagaaaagaaatactaatttacctttttaggaaaaacaagccatatacttcttctgttttctagggtaactaaggaataaggtaaaattcaataggatattcaacagtccttaaagactggaaattactggtttcaggtagagcttcccatatatttacggcaggacacacaggtgtgccttgaatgggttgtagatctactgagctattggttcccccagtccttgtgcttgggtggggtctgggacagccagagcactgggtccagtcacttttcctctcattttatccctgtgtgccatatctgactgtgccattggttagataggttatggtaccagggaaaaataaatgtcttaatgtgttcttcatgtattttgatgtgccataggtatgtatagaagctaagcatttcacagtatattcaaaatttttgcagaaggcattttttctgtggtgctagtacagtaaaatatagttcctttgagtggttatggtaaattgtgaggatatctttaaaattgtaaaagttaattttgtagacttgagccaataagtgtctgacattgggaaaatctttgcatttcttattactgagttcagtaattagatcaaagagtgggtgcttatagcccaaattaaatgataggggaaagatattaaatgataggggaatgatagatacccgaattgtccagttctaggagatttgttctttgctacttcttatattctacaaaagctttaaagtaagctaatttatataaattattcttagttcctggaatttagtagcatttaatttactaagaccaaataactgcctttttatcattttaaaaatttatgcctatgatagctataaaacactggacttaaaaaaattatgactcctaaatcagtaagaggatctgttgaccaagtaatcagttatttggtagtatctctgttagagaattaacattgccaataacaatttaatttccagtaccattcaatggcacaggatgactttgttttatgcacttggtctaaatgatctgtaaatcttgagtagtctcatgtttctaattaccatctaaattttttccgtgtctttgttcaacagattgagaaacagaatgaagaaggctggtttgctctttctacccatgtatcataagtgaagtcaagtctcactgagtttgttcttaataatttattacttccctttccctgctctgacttttaagtttttatatccttctttcagataaaacctacaaagatcctgtgaattagtactaatgaaacagagaaataaagcaattattttttgactttctcaaataagttttcaacaaccaactgacctacagctccctgtgaatgaaactttgactgtagagaagttaaagttttgtattttaatactttcttaagtattttaagggttttttttattaatacatttttacctttatctttattcagggttttttgaggtttagtatatcttagttgatccatttatttatttattttcctgaagaactaatttgctttgcatgtaacttacaataaaattcctctgtgtgattagagtctggctttcaggaatatgtaacacccacttttctttcttttttcttgggaagtcattgctgttcatcactttttccatcaagtgaaatatacagccttaaaaacaataggcctgggagtgtttgtttatatttgcttaagcaggtaagagtggttgcatttattataaaatcttatgtagtttttaaatgtgaaaatgtcatcaataatggtaatgcaaatcaaataaatatgattctagag

SEQ ID NO: 337 - DNA, 3299 bp, Homo sapiens
cgctccgcggttccggcgcctgaagttttagctgcggtggcggcggcagtcgggaccgactgcaagatgtcatttgtcagagtgaaccgctgtggtccccgagttggtgtaagaaagacaccgaaagtaaagaagaagaaaacttcagtgaaacaagaatgggataataccgtgactgatctaaccgttcatcgggcaactcccgaagatctggtacgccgtcatgaaatacacaaatcgaagaatagagcattagtacactgggaactccaagaaaaagctttgaagagaaaatggaggaagcagaaaccagaaactttaaatcttgagaaaagaagattgtctatcatgaaggagattctttctgatcaataccagatgcaagatgtgttggagaaatctgatcatctaatagctgcagcaaaagagctgtttcctcgtaggcgcacagggtttccaaatgtaacagtggctcctgattcctctcagggtcccattgtggtaaatcaagaccctatcacccaatctatctttaatgagtctgtcatagaacctcaggctcttaatgatgtagatggtgaagaagaaggaactgttaatagccagtcaggagaaagtgagaatgagaatgagttggataactctctaaactctcagtctaacacgaatacagacaggtttctccaacaactaacagaagagaattttgagttaattagtaagttgtggactgacattcagcagaaaatagcaacccagtcacaaataactcctccaggaacgccatcatctgctctttcatcaggggagcaaagagctgctctgaatgctaccaatgctgtcaagagactccaaaccaggcttcagcctgaagaatctactgagactctagactcaagctacgttgtgggacacgtgctgaactcaaggaagcaaaaacagctgttaaataaagtgaaaaggaaaccgaatttgcatgctctttccaagccgaagaaaaacatatcatcaggtagcacaacctctgcagacttaccaaataggactaattccaacctggatgtcctcaaacacatgatacatgaagtggaacatgaaatggaagaatatgagcggtggacaggtcgcgaggtcaagggtctgcagagcagtcagggtcttacaggcttcactttgtcgctggtgagctccctctgtcgcctggttcggtaccttaaagagagtgagatccagctacgtaaagaagtagagacaaggcaacaactggaacaagtattaggtgatcatcgagagctcattgatgctctgacagctgaaattcttcgtcttagagaagaaaacgctgctacacaggcaagacttcagcagtacatggtcacaacagatgagcaactgatatcactcacacatgctattaagaactgtcctgtgataaataacagacaagaaattcaggcatcagaaagcggagccacaggtagaagagttatggacagtccagagcgtccagttgtaaatgccaatgtctcagtgccattgatgttcagagaggaagtggctgaattcccacaggaagagttgcccgttaaactgtctcaggtgccagaccctccagataacatgaatctggccaagaattttccagcacatatttttgagccagctgtgttgttaacaccacccaggcagaagagcaacttaaaattctctcctcttcaggacgtattgagaaggactgttcaaactcgtcctgctccacgacttcctccaactgtggaaataattgagaaggaacaaaattgggaagagaagaccttacctattgatacagacattcagaattcaagtgaagagaatcgtctcttcactcagagatggagagtctctcacatgggagaagatttggagaacaaaactcaggctccttttgttaacctctcacagcccctctgcaattcccattccaacactcaacagtcaagaagccccacattctcagaagagctcccagtactgggagatgggcagcagctgagaacaaatgagtcattaatacaaagaaaggacataatgacacgaattgctgatttgacattgcagaattcagctatcaaggcacatatgaataatattattgagcccagaggagagcaaggggatggactccgggagttgaacaaacaagaaagtgcaagtgacatgacttctacttttccagtagcacagtctctaacaccaggtagtatggaggaacggattgcagaattgaatcgacaaagtatggaggctcgtggaaaactactgcagttgatagagcagcagaaacttgttggtttgaatctttctccaccaatgtcacctgttcagttacctctcagagcatggactgaaggagcaaagaggacaattgaggtatctattccaggagcagaagccccagaaagctcaaaatgtagtactgtctctcccgtcagcgggataaatacaagaagatcttccggggctactggtaattcttgttctccactaaatgccacctcaggaagtgggagattcacacctcttaatccaagagcaaagattgagaaacagaatgaagaaggctggtttgctctttctacccatgtatcataagtgaagtcaagtctcactgagtttgttcttaataatttattacttccctttccctgctctgacttttaagtttttatatccttctttcagataaaacctacaaagatcctgtgaattagtactaatgaaacagagaaataaagcaattattttttgactttctcaaataagttttcaacaaccaactgacctacagctccctgtgaatgaaactttgactgtagagaagttaaagttttgtattttaatactttcttaagtattttaagggttttttttattaatacatttttacctttatctttattcagggttttttgaggtttagtatatcttagttgatccatttatttatttattttcctgaagaactaatttgctttgcatgtaacttacaataaaattcctctgtgtgattagagtctggctttcaggaatatgtaacacccacttttctttcttttttcttgggaagtcattgctgttcatcactttttccatcaagtgaaatatacagccttaaaaacaataggcctgggagtgtttgtttatatttgcttaagcaggtaagagtggttgcatttattataaaatcttatgtagtttttaaatgtgaaaatgtcatcaataatggtaatgcaaatcaaataaatatgattctagag

SEQ ID NO: 338 - protein, 849 aa, Homo sapiens
MSFVRVNRCGPRVGVRKTPKVKKKKTSVKQEWDNTVTDLTVHRATPEDLVRRHEIHKSKNRALVHWELQEKALKRKWRKQKPETLNLEKRRLSIMKEILSDQYQMQDVLEKSDHLIAAAKELFPRRRTGFPNVTVAPDSSQGPIVVNQDPITQSIFNESVIEPQALNDVDGEEEGTVNSQSGESENENELDNSLNSQSNTNTDRFLQQLTEENFELISKLWTDIQQKIATQSQITPPGTPSSALSSGEQRAALNATNAVKRLQTRLQPEESTETLDSSYVVGHVLNSRKQKQLLNKVKRKPNLHALSKPKKNISSGSTTSADLPNRTNSNLDVLKHMIHEVEHEMEEYERWTGREVKGLQSSQGLTGFTLSLVSSLCRLVRYLKESEIQLRKEVETRQQLEQVLGDHRELIDALTAEILRLREENAATQARLQQYMVTTDEQLISLTHAIKNCPVINNRQEIQASESGATGRRVMDSPERPVVNANVSVPLMFREEVAEFPQEELPVKLSQVPDPPDNMNLAKNFPAHIFEPAVLLTPPRQKSNLKFSPLQDVLRRTVQWAPRLPPTVEIIEKEQNWEEKTLPIDTDIQNSSEENRLFTQRWRVSHMGEDLENKTQAPFVNLSQPLCNSHSNTQQSRSPTFSEELPVLGDGQQLRTNESLIQRKDIMTRIADLTLQNSAIKAHMNNIIEPRGEQGDGLRELNKQESASDMTSTFPVAQSLTPGSMEERIAELNRQSMERKLLQLIEQQKLVQLSPPMSPVQLPLRAWTEGAKRTIEVSIPGAEAPESSKCSTVSPVSGINTRRSSGATGNSCSPLNATSGSGRFTPLNPRAKIEKQNEEGWFALSTHVS

SEQ ID NO: 339 - DNA, 3312 bp, Homo sapiens
cctgtggcgcgctccgcggttccggcgcctgaagttttagctgcggtggcggcggcagtcgggaccgactgcaaggcagatgtcatttgtcagagtgaaccgctgtggtccccgagttggtgtaagaaagacaccgaaagtaaagaagaagaaaacttcagtgaaacaagaatgggataataccgtgactgatctaaccgttcatcgggcaactcccgaagatctggtacgccgtcatgaaatacacaaatcgaagaatagagcattagtacactgggaactccaagaaaaagctttgaagagaaaatggaggaagcagaaaccagaaactttaaatcttgagaaaagaagattgtctatcatgaaggagattctttctgatcaataccagatgcaagatgtgttggagaaatctgatcatctaatagctgcagcaaaagagctgtttcctcgtaggcgcacagggtttccaaatgtaacagtggctcctgattcctctcagggtcccattgtggtaaatcaagaccctatcacccaatctatctttaatgagtctgtcatagaacctcaggctcttaatgatgtagatggtgaagaagaaggaactgttaatagccagtcaggagaaagtgagaatgagaatgagttggataactctctaaactctcagtctaacacgaatacagacaggtttctccaacaactaacagaagagaattttgagttaattagtaagttgtggactgacattcagcagaaaatagcaacccagtcacaaataactcctccaggaacgccatcatctgctctttcatcaggggagcaaagagctgctctgaatgctaccaatgctgtcaagagactccaaaccaggcttcagcctgaagaatctactgagactctagactcaagctacgttgtgggacacgtgctgaactcaaggaagcaaaaacagctgttaaataaagtgaaaaggaaaccgaatttgcatgctctttccaagccgaagaaaaacatatcatcaggtagcacaacctctgcagacttaccaaataggactaattccaacctggatgtcctcaaacacatgatacatgaagtggaacatgaaatggaagaatatgagcggtggacaggtcgcgaggtcaagggtctgcagagcagtcagggtcttacaggcttcactttgtcgctggtgagctccctctgtcgcctggttcggtaccttaaagagagtgagatccagctacgtaaagaagtagagacaaggcaacaactggaacaagtattaggtgatcatcgagagctcattgatgctctgacagctgaaattcttcgtcttagagaagaaaacgctgctacacaggcaagacttcagcagtacatggtcacaacagatgagcaactgatatcactcacacatgctattaagaactgtcctgtgataaataacagacaagaaattcaggcatcagaaagcggagccacaggtagaagagttatggacagtccagagcgtccagttgtaaatgccaatgtctcagtgccattgatgttcagagaggaagtggctgaattcccacaggaagagttgcccgttaaactgtctcaggtgccagaccctccagataacatgaatctggccaagaattttccagcacatatttttgagccagctgtgttgttaacaccacccaggcagaagagcaacttaaaattctctcctcttcaggacgtattgagaaggactgttcaaactcgtcctgctccacgacttcctccaactgtggaaataattgagaaggaacaaaattgggaagagaagaccttacctattgatacagacattcagaattcaagtgaagagaatcgtctcttcactcagagatggagagtctctcacatgggagaagatttggagaacaaaactcaggctccttttgttaacctctcacagcccctctgcaattcccattccaacactcaacagtcaagaagccccacattctcagaagagctcccagtactgggagatgggcagcagctgagaacaaatgagtcattaatacaaagaaaggacataatgacacgaattgctgatttgacattgcagaattcagctatcaaggcacatatgaataatattattgagcccagaggagagcaaggggatggactccgggagttgaacaaacaagaaagtgcaagtgacatgacttctacttttccagtagcacagtctctaacaccaggtagtatggaggaacggattgcagaattgaatcgacaaagtatggaggctcgtggaaaactactgcagttgatagagcagcagaaacttgttggtttgaatctttctccaccaatgtcacctgttcagttacctctcagagcatggactgaaggagcaaagaggacaattgaggtatctattccaggagcagaagccccagaaagctcaaaatgtagtactgtctctcccgtcagcgggataaatacaagaagatcttccggggctactggtaattcttgttctccactaaatgccacctcaggaagtgggagattcacacctcttaatccaagagcaaagattgagaaacagaatgaagaaggctggtttgctctttctacccatgtatcataagtgaagtcaagtctcactgagtttgttcttaataatttattacttccctttccctgctctgacttttaagtttttatatccttctttcagataaaacctacaaagatcctgtgaattagtactaatgaaacagagaaataaagcaattattttttgactttctcaaataagttttcaacaaccaactgacctacagctccctgtgaatgaaactttgactgtagagaagttaaagttttgtattttaatactttcttaagtattttaagggttttttttattaatacatttttacctttatctttattcagggttttttgaggtttagtatatcttagttgatccatttatttatttattttcctgaagaactaatttgctttgcatgtaacttacaataaaattcctctgtgtgattagagtctggctttcaggaatatgtaacacccacttttctttcttttttcttgggaagtcattgctgttcatcactttttccatcaagtgaaatatacagccttaaaaacaataggcctgggagtgtttgtttatatttgcttaagcaggtaagagtggttgcatttattataaaatcttatgtagtttttaaatgtgaaaatgtcatcaataatggtaatgcaaatcaaataaatatgattctagag

SEQ ID NO: 340 - protein, 849 aa, Homo sapiens; identical to SEQ ID NO: 338

SEQ ID NO: 341 - DNA, 100354 bp, Mus musculus
  misc_feature (1)...(100354): n = A,T,C or G
cgccttcgaggtctctgccgaagcgcagagccgccttgtcccgcagccgacgggctccgtcccacgcccaccgccgaggtccgcggccgccggtaagtgtggtccccgcgggcccggagcggcagaggcgtagagctcgggcggtggcgcgtctgctgcagtgcgggtacggccgcgcgtgggtgtgggcttcagacccggccttctgcgcctggcagggtccgtgcgagcgggcctcgggccgcaggtggaggtcgaatggccaccgctgtcagcctagccggcccagggccgttctggaagctcagcctttgttgggcagggcttccaggttccctaatggtgtcccagcagccggcgtgcaccagccagcctgcccctgcgccggcggataagccgcggaggaggtgctcacccggtgacagcagtccccatctcgggaagcctgtgtagggttgttgaggacaccccacctttaaaagctattcctgtgaagtgtcaggtgtcttgctttttttcccccctctagtgctatttgatctcagtgtaaaagaccgaattcaaaactgggccagttggtaaagagggttgatgcgctgtagaagcagggacattatcagcaagtaaataggaaggctgctgattgtcggcttttactgtgttcatcatactccttccttgtaagcatgtttacaaccgacttccggatccagcagatggcttttgcgtcttcacctgagcttagaaattaggaatgggtaaggcgagagcactcctacgaatgctttctgtttcaaggtaaaggtatcgggtgcacgtgtgcatagggctttgcgtattatcttttgtagcctccatagcgctatcagcccactgaactgcggttgtatctcacaaaaataggtgttggagatggcttgtgagaggggctgtttagaggttgacctagccattgtataacagaactgagcccgaatcctatgcctaccactaatccctaatatccccatctttcggcagtaatgtcccttgtgggactccagtgtgtttcgtaagtgaaatcagtgtagagctgacacagaaactgtgtagtgttgtaattccccatgcccgtattttgaaggggttcgcttgaataacctctgagcttcttacctgtgcagttgtgccagcattgggccctcacagagaaagaactgcacctgctgcctgttcatacctggctgacagcctccttgccaagggcagccaggcgctctctgtcatcctggacactcaccgtctcagtgatgcagctcttcctggcatcatgagagtccacacctgtgggctccgaggactcctttgctgatagcttgccttcctctttcctctcttgtccaaaccagactcggatagctctgtgtgtgtgtgtgtgtgtgtgtgtgtgtgtgtgtgtgtgtgagagagagagagagagagagagagagagagaagagagtgtgtgagtgtgtatgtgtgtgtgagagtgtgtatgtgtgtgtaagagaagagtgtatgtgagtatgtgtatgagaggtgtgtgagtgtgtgtgtgtgtgtgagagagagagtgtgtatgtgagtatgtgtatgagagtgtgtgagtgtgtgagagagagagagagagagaggagagagtgtgtgagtgtgtatgtgtgtgtgagagtgtgtatgtgtgtgtaagagaaagagtgtatgtgagtatgtgtatgagagtgtgtgagaatgtgtgtgtgtgtgtgtgtgagagagagagagagagagagagtgagttgcagccaatctttgggcttcctttctcaggaaagacatcctttttattttgaggcaaagtctctccttgagccgggagcccaggttaggccaggctggtggacagagccctgtgctaggattacaaatgtgtacccagcacatctggcctttctatctgggttgtggggatggttcaggtgctcagcacttacctgactgagccacctccccagcccagactcagtcagtattctagcctaccctctgtcacctcatgtcagccttattcagctgcagttatttaagtagttcctcaagttagactagagacccagtcctgcttgagaatctttgttctgggacacttaataaacaaactatgcttgggatatttcaggactgctgttgtattggagttcagactgaaaattccttagaggaacagggggtgggggtgggtgcagggagcttatagactttgtggctatagcaactttgtagacttggcagaataaaagcactgctgctctgatcgccaccctttcctcctgttttcacaaagcaagaaacctagtatttcagaaaaaagcttacaggtcctcccgagagtgaatcttgtgggttcatttgcataggcagcagcagcagcagtgtggagggatgcgtctctctgggaacacacccagtacagtgaagggagcagagggtggagccttgtagaatgagggaggcattggtaatgaggagagctttacatgggcaacaagaggattctgggagtgccacgcgagaaactgggagagggagaagaatgagagtgagagactggacacttgcaggacagagggacaggcagaggcagaggacaggggcaggcagaggacagagggacagacagagggagcaggacagagggacaggcagaggacagagggacaggcagaggcagaggacagagggacagacagagggagcaggacagaggggcaggcagaagacaggggcaggcagaggacagagggacagacaaaggaagaggacagaggggcaggcagaggcagcaggacagaggggacaggcagaggcagcaggacctagtgtgagtgtggtaggtgaagggaaggagaagtctagagccgtagaggagccactttgtacagtgtgggaaaatgagggaagagagtgctgagtgggtagaattcagagtttagtttttgttttttgttttttgttttttttaaaaagcattaatttgggtataattttcagaccatcaaattcaccaggtatataattcagcaattttcagtggagttacagagttgagcagtgatcgccataatcacatttccatgacctcaaaatgaccctgtctgtctgtttctggtccacccaggcaaccactaacctgcttcccatcttgagagacttgcccaccttggatatttcatccaaatggagtcagagaatacatgatcttgcttggctggccgtttccactaagcttatgctttcttttccccaccatcccccaccccacagcatctcatgacccctctcctcactgtacgtatgtctgtctgtgtcatgaccctcaggatctcatacatcttagcttggtcttgaatttaccatgtctctgaggttaaccttgaactctcagttcaagtgaattctcttgtctcactgcctagtgccatgactacagacctgtttaccacatctggccagaactcctgtaacaagtactttacccactgagccatcttgccagtcctcttacttggtttttgtggaaagggtttccagtctcctagtctagtcatacaggactgaattgctaagtggacctcttaggttgaaagcacgcctttgggtttaataaaggcccattgatgggaggggccttgggcatgcagaattaccagccagccataggatataattttgttggtttctctcctagaattagttttgtccattaggcagatccagcttccttgcttctctctgcccagtgagcttgtgtccctcggaatccgtgagggtgggaactctttatctctatttacccagtgcctggcctaggaacctggctaaatatttgaattggattgcccagtaagcccagcctgtggacacaggtctctcgtgctctgagttggggaggatttctgctcaggagcagtgccctcatgtgttttctgatttcacgtctagatccctccttctgtgaggatgtaagatggacccggaggagcaggagctactgaacgattacagatacagaagctactcctcagtaatcgagaaggcgttgagaaactttgagtcctccagcgaatgggcagatctcatctcttcgctcggcaagctcaacaaggtgctgggtcacttcctatgggagggtagcgttgggaaccatggcattggggaatggaggtgtcttcttatggtggggaatttgctgtgggtggttagaacagctagaaagacagaaaagaacaaccagggcttctgtcgctcagactcaccctcgcctagttcatgtcactacattaacttccagtgtctttggagcacaaaagacagatggatactgtgttggtattttatagtgtggatatggtgcagtggtctttttgctttttggtttttccagccaagatttctctgtgtgtcctgagactctgtagaccaggctgccctcgagctcagggatacacctgcctctgcctccaagtgctgggagttaagacgtgtacagctacacctggctgcaatggcttttttccttaagtctgtgtattgacgggatgtacagtggccagtattattcagttattcagaggttattctgcgtcggatggggatttttctgttccttttgtgctgtactttttctagagctgactggagacttctagaagaacagaaagcaaaataattgcacgtgtgcctatgtatgtgagtgtgggagtgtgtgtgtgtgtgtgtgtgtgtgagaaaaaaagagagagagagagagagagagaatgtggttgtggagaaggattgtgctctgggaagatccaactgaataaagggggctccagctatctctttacgatcttcctgtcctgcccaaagggaagactctgcagggactttcagagaccattgtggcatgtagtggacagccactgtggtgaagaagcgtctgtgccctctcaggttgtctggccatcacttggctttggagcatgagtatcaggtgggagttggaagattcccatctctgtgcaggtcaggagactccagcaaaccccactgagaagaggctgcctccctttatctttcccaggtatagggtagggggttggtggagaatagacagattgagccagatacactgcctgggcagctgttatgtccctctgcggccagaaagcagccctcagagtgcttgcttggctcgcctaaggccctgggctccagtcccagcataggcgtgggggtggggcaagcatctcagcctggcagatggctgtcctgggcttggtgagataggaggttagtactcattggccaggaaactcctggtctcctggaagggatgtttacatggaaatgtcacaggcaggcgctcagtaggagaggcaaatgtctactcctgaggcctgttttacataggctacagaagcctgagtctctgtggttggacagctccagccatgctcaggtcaaagggttactccgagaggcacagctggagactgaggcatgtctgagtcctgctgggtcttactcctcagagcctgacctacccagtgtccaagagcacacaccaggttccctgcagagggaagtgaagaaggactaggagctgaaggcagcctgaaacacaggataagttcaaacccagcctgagccattgtgctgtttcagaagctaacaaaaggaaagacaggaaagaacactgtgcctgtttatctcagaaaaaagcagttgtgatcctcatttctacctttcaaaaaaaaaaggggtttatttttaattttaaagtgtgtgtgtgcacgcgcgcacgctgggggttgtgtacagatgagggtggcgggtcctccctgtgctggcgttacaggtggttgtgacccacatgatgtggatgctggtaataagactctgtaagagcagcaagcaccctgaactacaagtcatctctccagcccctcctctgtgggtttttaagacaggatagctcaggctggctttgaactcaccatatagctaaggttggccttgaactccaaatgctcctgcctcctcttccaagtgcagggatttcaggtgtttatcactgcatctggctgtttttcttaattgagatccaatgcatttgtccactttaaagtgtgcagtgcttgctttttagtacattttacggtgccgtgccaccatggaatttctcattccagaaaaatgtcatcttgcagaaggaaactgccactgaaccacctgtccacctacctgcatgctttattctgctgtctctccctagggcccttgcattggaatcaaattatgcagtgttcagtcttgagtgtctggctcatttcacacagcattacatccacaaggctcaccagtgcatggatagattgttgccacatgtgtccccgatctggttttacaagactgaaagctagcctgtcttttgaaggctagcttttttggctttgtgagtagtgattatgcttatttctgtatttgttttgttgttttcttttttacagtcatgcctctgtgtgggtgagcctgtgccactgtatgtgggggggtgtaggtgtgtgtcagtgtaggtcagtggacacctcataagaatccgtaccttccacagaagtggatgctcacagacagctattggatagatcacagggctcccaatggaggagctagagaaagtacccaaggagctaaaggggtctggactcctataggtggaacaacaatatgaactaaccagtacccccagagctcgtgtctctagctgcatatgtaacagaagatggcctagtcagccatcattgggaagagaggccccttggtcttgcaaactttatatgcctcggtacagggcaacgccagggccaagaagtgggagtgggtgggtaggggagtgggggggtggggtatgggggacttttgggatagcatttgaaatgtaaatgaagaaaatacctaaaacaaaacaaaacaaaaccaaaaaaaagtattaaaataaagttttctgagtattgcatggtagaaatttcaaagcaaagtgattgtacgcattagaaagaaatgttctgtgaatattgacagtgtacattagtgaaattactcaagagcccaaattattgtttgtagtttctttttctagggctcagtggaatggtttgttcattaggagtacagtttctgtggttttctatattgattaagcaaattaaactatctaaacatttgtttactgcaaaaaaaaaaaaaaaaaaatcagtaccttcttttaccacgtggggcctgtgtattgacctgaggtcctcgggcttaggggaaagcgtggattgactcagggagtgccagactgtttattatgaattatgacagttgtgccactgttcatggctcccagcaatgcaccgggacaccatcttctcctcatccttgtactgaccttcatggggttttttgtttttttttttgttgttgttgtttttttgaaaatagccctcctactgtatatgaaattataactcattgtggcttaaaaatattgtgtgccctcatgtgtatgcatggggatgtatgcacacatatagaggtcagagggcaagttgaaggagtcgtttttcccttttaccatgtgagtcctaaggacatcaggtttggagtgaggaacctttgttcattgagttatctctctagtccccggagagggagagggagaaagagagagagaaagaaaaagggagaaagaaagagagcgagctattaaatgtatgagtgctttgctggcatgtattctgggcactgtgtgcctgcacagaagtcctggcaacaggagtgtgtgtggtgggtaacgtagcctctatgttttagaagcagagagatgagcagtggtgctcagttgaccttctctttactcagcctagggaatggaactgcccacatttagcgtggctcttcttaccccagttatcatagtctagacactttcacacagaggtttctctctctcttgtcaagttaacagttgatattaaccatcctgtctagtgtagctagtgcttgcctagtgggtcctgactctactacaggggagtgattattctgttgtcccaattcagatgagagagctggagcctagagagctaatctgagaccatgagtacagctaaggctccggggctctgtcttcctgctatattcctggtgtccagggctatgtcggtgctgggtcaacagtgtcttggacgttttaaagggcttgattcctgagaacaacttatacctaacgttactcttgctgcttgtcctaatgatgtgggaaacagagagagtggcttcagcaagagtgaatagatcctgagccagggactgaggcggtgcaaggggctctgccgtcaacacacctgacccctgagttggatggagctggcaggttccatcatcctataggactcgtcttatttccacctatatagccttcattaatataaactgagtccactcatccctttccaggaagaaatgtggtgccgaacacctgacctccctaagatttattcactgaggtgaccctatttgtggcattacagtgggtaaaagttctagttaacagctcactttttgctacagattttacccaagaaatcccaccctgtcattcgggcagtattgcttgtctcttatcccctccaaagcaaggaacaagatttcatgtatctcaggttggcctcaaacttagctttctttttttttttatatttatttgtttgtttgtttatttatttattttatgtatgtgactacactgtagctgtacagatggttgtgagacttcatgtggttgttggggattgaattttgtaggacctcgttcgctctggcaggccccgctcgctcaggcccaaagatttatttattattatatctaagtacactgtagctattttcagacacaccagaagagagcatcagatctcattactggtggttgtgagccaccatgtggttgctgggatttgaactcagaacctctggaagggcagtcagtgctcttaaccactgagccatctcgccagccccaaacttacctttctgcctacccttccccaccccgcccaccatagtgcaccagtgtatgtggtaatgggattgagcccagggcttaaagcaagagaccactcagctacagccccagccctgtgcccacatgccttgttctctgctgctataatcagtcagcgggccagaatatccagctaaagggtttgcaagacttgagtgaggcagagtgacagtaacagtctgctcccagctcggcatgtgacagctgtcatttgtggggaacttactatgcgttaaggagtcacagtgccatattgtatagtatttgccctaggcctggtggtgctggcctggcctgttagcacttgggaggttgaggaaagagtgtggcaaatacaaggcctgggctccagagtgagctcaaggccagcctgtgcgagttagtgcgaccctgtctcagaatacaaagcaagggaagggcttaggtacagctctgtggtagcacccttgcctaacatgtgagcctgtaggttcaatccccacactgtcatacagaataaaatagaatagaataaaaagctacttgccatctttgctcgggcctcagccagtggaggagggctcaggcggccagcctgactcaggagctaggctgttgtcggactctcctaccttttcctgtcagtgttgtacggtggagaacaggatgtgcgccatctcactgccaagaagccttcctcctttgcccaagtgaggctggtgtgattgtgtcatcagaaactattagctaactcacttaggtcaagcagctgtcagtggctgctgtgtgttgaattgtacttatcaaaatcctcacttctggtccctctgaatgtaactgtatttgcaaatagacttttgacagagatgataaagctgaagtgaagtgattagtgtgtggctggaacccactgtgatgggtatccttacgataaagggctttgttttcttgttttgttttttgagacagagtctcattgtgtatccctggctggcctcaaacatgctatataaaccaggatgctctcagactcatagaggtccacctgcctttgcctcccacgcgtgggaataaaggtgagcaccaccacagaagggggatattagagccaggtctggtagctcaggccgaggcaagaggacagcaggtttaaaggctgcctggactacagagagtcttcataggggtcccttcactggcaatccagtgaagacttcaacctaataacagaaggagattgggagggctgtggcttacccactgtgcttaagaccttgggctcagctcctagtcctgcaaacaaagaaaaaaaggaagaggggacgaggacacagatgtagatatgggtgatgaagacagggctcaggacaacacacctgccatccagggaacaccacagacatggcagactgccagagctgctgggaggagctgctcttcttcccagaggagccactgtgccgatacctgaagtgtcagctgagagtgacttcagctgctttctgttacaggacatcatttaagccactcagtgcatagtatacattgtagtggattcatcaaaggatgtcagatgccacaatagactgcacatctccagtgctggactgttgcagcaacacaaaacccgggttcccgtgcagtaggaggctttactgctgggacacccggtgtgatagcgagtcctgacttatgaaagaaagccaaatgtgggcagtggggtgcaaggaggcagtggctgtttttagacagaggtgactcctctcttttaacatgacatttgagcagaggcctgagggagcaggcggcagggaggccgtaagtgatgttggcatgagtccgaggcacggtaaagggataggtgtggtctggtttagaaacagagtattagaggaaagagggacccctatgattcagtcccttggttgtgggggcccctgggtttttatagggaggacaggaggagcagagcaggaaggcagcccccagacttgtctgacaaaactaactatggaggtgtctgccaaggccatcagacattctggtgtatctgactctaaagagatttcctttggtagttaacattttaaccagctaggaggggcatctctagtgtagtcttgagacagggtcttactatgtagaccaggctggccttgatcttgcagtcctccctgctcagcctctgggtgctgggactgaaggtgtataccaccatgcctggctctgggatattagagccaggtctggtagctcaggccgaggcaagagctagagaaaagcaaggggaaggggcagccctgtcatagcctggttgtcccatggggatgttggagaccacccccctctttaaatgtggaaggcagtggaaacagaggacccctgcagcagcccgaggactttgtgtggaggcctgcactcaggtgaattcaggattcttggctttgtggcggaagagaatttcaggatgaatctgtatgctgcagggacggagattattaagaaaaggtttttaacgcctatttcagctgggcaatagggagacaaagagggcccctgaggaacaggacagtgggtacccacggtgggtgagcctctcaggagagagctgtgtcgggtgtcttggtgatgactgtgtgtacggtttggtggctgttgaagttagatggctccacaggcttctaaggagctgctatttttatttttcctttttaggaaatgggacccaagggtagttcctgaggtgtataagacaggatttcggggtgataagacagaaatccaaggtcacaggaatgcaaggagtccttactgtggtgagacaggggagttgagatgcatgtgtggtccataaacaagctccacaattcagtttatgagagtctcggaaagtggcgggctttgcagttaagaggagtaaggataaattcaagggtgcgttcactctagcattaagcatgggtcagtgccattttaacattcctacaggaaactccccatggaaggagaaaactgctccgggtaggcaacctccatcgtgaacttacttatatataaaaattctatccagctggctctagactgcagccagactccggggtgggggctccttccttcccctccgcatgcccctcttttcattttccctgtcttctgtcctgtctcataaggacaccagtgagactccctggaataagcgtaccccacatgcctcactgtatcctgagtacctttgaaagggtccgtcttctcgtgcagtccttttgaaggtattgggggttcagactctgctcaggcagcgattagtaggtctgacagtccagatgctttttctcacccaccagcggaggctacagtgtcatttcttcaaatcttttcactgcccaggagccttgtggaaacctttgcctgtgtagtgacgctgaggacctcctggtctggcagtgactcagggcaggctccaccgctccctacaggccgccttcctgatgacttgagccctggctgcagcacctcagaactcctttaagaagagatgacgctgtggggtgtcctccaagtatgcatgagcgtcgcagtatggggcctctcttctctgccctgaccagctaccccagcatgcctcactcccaatgcccagccctaataaggagagtgacgagatgcccattccagctgtatgaaaccaggctgtctctctcttcacccctagttctccgttgttagcatgtggcactgtggtttggagctgtggtgtgagctgcttgctggcagccttctaatgctctccactgttggtgatcagctcgaacccctgcttccaacgtgtgacctcagtgctcaggtctggtgtgtttgcccaggaccaggtttgaatgacatcacagcctttaccgtggattacaaggaccttggtgactcagttgtccaatgcgagccactcaaacatgacaaggtggaagtgggtctttttgggatgagccttctgtctgcggaggagtctactgcacttttaatattttgtaaccaggatagtctttatttattttgtgcttgaatgaaagaatttttagttcatcctttccagtctgctggagggatagaagttgaccaagttgacacagacggttgcctcttcagtgaccagtaactaaaggacagcagcatgtactccggcagaaggaggtcacagtgcaggaggcagctagtgacctggtgagtccctctgctaaagactcaacccccaagtgactctctggagaaatcgtcattagtagtcaatttgataaggtcatagggtgagcccttatctgataggactgtgcccttggaaggaaaaaaaggtgccctccctctgtctaccgtccaagcacccacgtaaagacacagccagaaggcacttatctgcaagtctccaagagacctgaaccagctgtccctggatcatggcctatggtactgtgaggtaaatctctgttgtttaaagcacacacgctacattatttttttttaaggcagccaaagagactgatgcagaaaggttggagttaaacctggctgcttttcagtccatacaactgtttggacatgagcaccagccttcaggctggcatttgagactaatataggcgttcctgtttgtcctttagtgggccccaccccctccaagctttattgacacacagtaacctgagcattgttataaaaacccaactgagccacgacaccaacactgcacctactaagtgtgatttggtggggttttgacatgcgtacaaccccttgagccccttgccactgttaagactgtgtcagtcccctccagaggttccctcttgatatattttatatccatatctctagacaactgtctgtcaccctcctttctgtcactgtaaatgagtttgctttttaagacgctttctgtaaccagccaggtgtggtggtaaaggcttgtattcccagcagctgggcgatagatgcgggggacttaacagttcaagtccagcctcggatacatagttttacagttggactgggctacctaagactgtcctcaaagtaaactaaatgaatatttgtataaatgggcttgtcctgttactcctgctctggcctttgtcactcacccaggctgttctgaaggtcagccaagaggtagacactgataattcatgtaccttgtactgctgagtaagatacacagatacacaggatccatttccatagtcagttgagttccttccagtggatatgttttaattttcttttcaacaatttgtgtgtctgtgtgaggatcccctggaactagagtcacagacagttgtgagctgcggtatgagtgctgggaattgaacccgggtcctttggaaaaacatccagtactcttaaccattgaatcatctctccagcctgtcttaattttgtaaacatttctttgtgtgtgtgtgtgtgtgtgtgtgtgtgcatgtgtgtatgtgtgtgtatatgtgtgtgtatgtgtgtgtgtgtgtatgtgtgtgtatatgtgtgtgtatgtgtgtgtgcatgtgtgtgtatgtgtgtatatgtgtgtgcatgtatatgtgtgtatatgtgtgtgtgtgcatgtgcatgtgtgtgtatgtgtgtgtgtgtgtatgtatatgtgtgtgtatgtgtgtgtgcatgtgtgtgtatgtgtgtgtatatgtgtgtgcatgtgcatgtatatgtgtgtatatgtgtgtgtgtgcatgtgcatgtgtgtgtgtatgtgtgtgtgtatatgtgtgtgtatgtgtgtgcatgtgtgtgtatgtgtgtgtatatgtgtgtgtatgtgtgtgtgcatgtgtatgtgtatgtgtgcatgtgcgtgtgtgtgtgtgtgtgtgtgtgcgcgcgcgcatgcacaggtgcatgtacctgtgctcgtatggaggccggaggaggaggagctggaatggcttggagttacaggctccttcatgagggagctgagctccagacccaccctgtccctcaggattgcgccagcaagtgctctcggctgctgagctgtctcaggcccccacagctaatgtcttggaggccacagtttgccagcatgatgttccattctacatcctgccactataagagctgcagcccttccctgccttcagcccttggtgtgggcagacctgagccactattcagagggaaaggaaaataagttcattgtgacttgtgcatttcccacagatagacaattagaatattaacatgggtcactgtaaatttattcaattccatagacataaaacacaaagacagttggaagagccttccttgttgtatatggtagcaaataattggaagtatctcccagcagtcagggagcgcctccaagtaagtcacgatgtggacagtaaagtgacccatgtgcccctcagttgacggaggcctgtggcctcacaggaggttgtactcgcggtaaaatgaagggacagaaaaacaaagtggcactttctacaaagctctctcagtcctgcatgtatgtgcacacatgtgcatgcacgcatgtgtgcatggacctgcaggcacctgcaagagctggttagatctcttggaactgatgctcctagcagttatgagcggcccaactcggattctgggaacagaactcaggccctctgtaagaacagaaccagctcttagctgctgggcagctctccagccccagcacattcggtaaggtttaatggcactcgtgccctccacttacatcttccaggcacactggctgagcaagtggcccaacaagcctctcctgtgggagaccaggcaggtgctgtcattaggcaggaccccatcacacagtggctctagtgcagggcctctggcgtttctcgaagtctcgcccctgcaccccctctgttgtttgtctcattaggaatctgtttctttgtaactgtgtctcatttcatcagctgatcaatacgtgaagtgttgggctggagagatggctcagcagttaagagtacgcagtgttcgtgcttcagaggacgaaagttcagttcccagcacctacgccaggcagctcataaccagcagctccaactccaggggatccagtgtctcggggctttgcagacacctataatcacgtgtgtctacccacacgtatgcattattgtgtatagtaaataagcccttagcaatgtgtgtgtgtgtacatgtggatgataggtaacgtgtttctcttatgcagtgacaggtccttccttactagtgcttctgctgactccccctagatgcagaagcacctgcctggtctcccacaggtgagggaggcttgctgggccacttgctcagcccgtgtgcctggaagatgtaaatggaggccacatctagatgcctgggtgccttggagacagtctgattggattgttgggggaggcaggagcacggagcatggtgagggagcactgagcttggtgagagagcagctagttcaatgcagactgcccgttccccggtgtggggtgaaagccctgctgtgtaccgaggtcggtgggagtgtgttctgaggtagctgagaagtaacactgtggttctcagatttaatggccctccactttccgtggcacagattacttcagatgtggcctcgtgacttcttgggccgccaagaagtggcaggaaggcagcaggccagcttcaggaagggatttttttctcctacaaggatagaaaaggaccaagcacttactgtgtggttagttttgttccacggagaatgggcagtttttgttgtggtcttctttgtatttgtgtaagatcttaatgcctaagcctggggcagacatcctagcccttggcaggaaagaaagaagataggttaagataagagtcaactcactcttgtgcttggtcactcaaaaagctgtgttttttgaggtgtcttttcctttgcataagccagagacgaatcctgctcctctgatgggagagcctcagccttaggagtgggcatctggggtggtccgttctgtgcactgcgagatgtttgttaacctcctggcctcttgtccactacatgccagcataccctctcccctcctccacccccaaatagaaaaagtcataaatgtctccagagatccctgaatgtcccctgaggggcagcattgccctagaattttgactttataagttacattgtgttttctttatttaggatttcatggttggatagtctgtgcccatacagccaagtgtatccaaccaagcctatctgttccccttacccaagcggagcctgggcctgtgcagacatatttgacagttggcagtaaacgtgtctgtgtgtccctcaaagctgcagagggaggctaagggtagagctgagtttgcctggccaggttcggctcccccactaccccccccccaacccctacccacgtgctaccaaaaggaaaaggaaggagtgaggtttgtttagactgtagctcaggggcagagcctttgcctagaatgtcagaggtcctgggttcacacctccaaataaaaaattaaaacaagtaagtcttcctgtgactctagaaaatagaaaggtacagaatgccagtctgcattaagttgcagctggctggcagcccggtaggctggctgggccagggcttttcctgagctaccgcagaggccgagcacagagccctgttgtgtttctggggatccatgttattccagcgccccgtatgccaaccacagtgtcttgctctttgtcccgaatgtctcctttgctctgcatagagcaagccaggctcgcataacgtcatcatcctccgcagcgcgcgctggtactgcctcttcccacccagcctccaagagctcttctttaacagactcctgaccccgtgcagaccgcttgtttctgatccaggaaagcaaacatccgagagaaggaagaccagggtaggatcaaaccagaccaaagctgatgaaaccaagtcccccatgtgtccatgagagctgtaaccttcagtccagcctgggactctcagttacatcctttgacattcttgccccgcctgatgtgcggctgcggagatctctggacggtagtgtgggggaagagctgacactcagtcccactggcagtgccagctgtgttctcctgtgtgacttccagagaacactgtggtaagtagtgcttcagggactaacgcctctttaggatctgtaaccgctctgtccccaggctgttctttcttctctcctggctcaggccttaacaaatttatctacataagtttgctgcccgtctgttacacatgtcatttgtatgtagatggcagtatgtttaaaaaggaaaatggtgactccttctggaaggaagccgcagtggaagcaagcctcctgttgctctcctgttgcagcatgctgttcttcattcttacatacttcccagttgtcagcagcgcatggactgcaagcttaggtaggcttttcaccacaccttccctcccagtttcttcctttctgatggaactcagaggtcttgcctctgcctggagtggcggtcagttctatgtctgtgagttcttggtctcagaaggtcgattgccagccgggtgtggtggcgcacacctttaatcccagtgggagcagaggcaggtggatttctgagtttgaggccagcctggcctacaaagtgagttccaggacagccggggctatacagagaaactctgtctcaaaaaaaaaaaaaaaagggtgattgcctctgtaagctccaggggcttcctcgaagtttccttccgtgtagtttccctaacagcagagtttttttatttagcgaggtccatgtcctctgctggctgtcaagtggccagagtatgaggtgctgttaaaaagaatagaaccctggtctagaaaagtgggagagccctgcagagcaccacagctgttccgagctcctctgtggggaggcaaggaaaatggaggttgatgttgagatggagaagttaaaggatcttaacgggctgaggaaggcagctctggctgtaaagtactcggtgtgtgagtctcgggaccgaggggaaatccctagaacccatgtaaaatggtacatgcctgtagtcccaggactgaggaggctcactagtcagccagtctagctgcatctctgtgttccaagttcaggaagagactttgtcccagcagataaggtggaaggtgatagaggaaacgcctgtcatcagcctctggctccacacatgcatgtaagccacacacgctcggagaggaatgcacatgagataaactgagaaggggaaagcagcatccatgtccacatgggtgttgtgttgccacttgagcgcagggtgtttcttgtgctggttccatcctgggaggtacacctgtaatcccagcactcagaagactgaggcaggaggatcgcagtgaggtcttgtctcagaaattataaaagtcttctgtcctggcacattgattcctgtgtcattataaccaagagattgaggcgccctatgtagtttaagatcttgttactcgtgatacatgtgtgtgtgcatatgtgtgtgtgtgtgtgtgtgtgtgcaaggggggtattttaattgggagagatacatgtgaagggatgtaccagtgtgttcatgggcaggggtgtgtctttgtacatgtaagatgtcactgtgtattgaacgctggtgatcctgtatagagtgtgtgcatatgtagagggtaacctgtgtgtgtatgtacacgagcagaggtatatatatgtgtgtgtaggctgtatgtctgtgtgtgtatgtgtgcctgcactctatgtattaaggtactgtgaagccttggacacccaggtagcctgcgacagactggccgccattgagaggaggagcccgactcagacccagtccgtagtgcagacccctggccttactgtggcttcctgaactctttatgggagcatagttttcctgacagagcccactctgggttaattaaagctgctgcctctgtgcccagcttacagctgtgcttggctcctgggcctggcctgcaccagccagttcccttcatttctctgtctctacttttgtgactgtgctagttcaaatccttcctctgcagatacccaccacccagcagcagctcagaaagccctagctgatagctagaacgaatccttctggccttgaactcatggcagtcctcctgcctctgccttgaaagtgctaagattataggcctgagtcaccacagctgacttaagaaaaatattcactcgctcactcactcactcgctcatttatttattggttttggtttttgtcttctcaagacagggtttctctatgtaacagcccagctgtcctggaactcaccagactaacttcaaactcacagagacctgcctgcctctgcattcccaagtattttagttagttagttagttagttaggtttttggttgttttgttttgtttttgtttttgttttttgagacagggtttctctgtgtagccttggctgtactgaaactcactctgtagaccaggctggcttccagttcaaggatctgcctgtctctgcctcccaagtgctgggactaagggcgtgtgccaccatacctggcttaaaaactttaaaaaagaaaatcctagtcttctaatgtatgtcgctactggagatgactggctgacctgacctgtacaggtcctctccggaagctttaccaggcgagggtggcggccgtgggtgtcgagagcctcattatgaactgactcatgctggcatcactgggttagagttcactgagggagtgcagcgtggtgctgttgatcctgtgacctttggagaaggaggcttcttgtttacacagaggttgaaaccgtgtcactctccactgaaattccgaggtctcactgcttactgtgggtctcagcgccctgcagtgacccagcgaggccagggtacccttctccagttcatctcatgcagccaccctctcatgtcactgccatctgtcacagcacttggtgctggcagtccctgacttgccttaagtggaagtcacatctgttctccacctgtctggtctaaagggcactgttggtgtcccatggcgaggcttggtaacctggccagcctgactcactgcattgttgcgtggtaaagcgggcgtccctgtaaagatggcaggcgtccagaggaagctcgtagtgtttactgcagtggttactgtgcctttggttctatgagagacctgtgttaagttggcttgtttacattttgtacagacagcatgtggccctctgcagtaagcataggcttctgcagggacactctggcctgtgccttctgggaacttgtgtgagtgagtgtgtgtgtgtgtgtgtgtgtgtgtgtgtgtgtgtatgcatgtgtctacaagtatgtgtgcatgcctgcatgtctgcgtgtgtgcatgcacgtgtgtgtgtgtgtggtatatgaagtgttcgtagcatgtacacacacatagaagtacatctacactgagatcagaggagatgttgaatcagggtctcacactgaatctagagagctaagctgatggccagtaagcccacgtgatcctcatgtctctgtcccccacctactgctccacccatggctgggctggtgtgcatgtggccacatccagcattatgtgtagaggcttacgatctgctctcagctcctcccacctgaacaacactgagggaaccttctgagctcactgtccaagctttcagacacagctgagtctggagaagatcctgcagtcagactgtgctgcactgggaggaactgagtgcagagacgccctggggtggacacagtgagctctttctctgcttctagtcagaaacctaggctgtaattcaatccccacccccttctttaaacatacattttatttttgttttattatttatctatactggggactgggaatccaccccaggctttctgcatgcgaagcagatagtatactacttagggataagacattatacctcctgctcctgttattttgttttaaggtcaacctgctgtgcctatgggtgtaatgaggtcaagaatattgcaattatatcctaatggtagttccaggattagatagctcctgcgttacttaaacaaataaggcaacttcctgttcactcctatttttcctttccatggagctgactgaaaatgactttggaaattattttctcttcccagctcatccagttctctgagtttatatttgtagaccgtgtcttatgaattgtgtatgttaggcataatggtcaacccaatctggacttccagtttcctgaaaataaaaccccactgtgacctgctcagctgtgacctgccctgggagcatttgctaagccttcttcactgagccacctgttccgcagcagcagcagcagcagcagcagcagcagcagcagcagcagcagaggctggaaagagcagcagagtggaggccctcctcagctgggccaggatgcagctgatgtgcaggatgaccccgagttagtacaggggaagtctcctggactggatatgcaggcaggagatggtccatcccactgcgtgggagccggaagaggccgacctcccatgagtgggtagctgatcctgcgctgggctccctctttacacccaatacttcaagcccttgaagttttctcagccaagttggatgggccctgatgtcagatacataagcacatgggagttgaggtgtgttactggcagaggtaacagtggggctagctaggcatgatggcatatgcttagaatctcaagtgtcaaaaataactgttctcagggaaggtgggtgacagccctcactcctctgttgccctgagacacagggtctttccctttgaaatggttgtaacatacacacagtagagaagtcgccattctcacctttctttctctgagacaacacagtgcttgctgtatcacccaggctgttttcaaatccttgggaaactgaggccagagaaccgctgtgtgttaagacctgctctgaactacatagcaagaccctgtttccaaaaactcagctggcaagagggtgaagcacaggatctttccattttaaagttgttatataatgtaaaagttaacgttttaatccttttgatacagtgtcttgctgtgttgtccagaatgtcttcaaagtctccaacttctcagttccagcaatcttgtatcaacccacaaaggagctgagactacaggcatacacacagcctgagtccaccctcaccagggggcacacacagcctgagtccaccctcaccagggggcacacacagcctgagtcctcaccaggaggcacacacagcctgagtccaccctcaccaggaggcacacacagcctgagtcctcaccaggggggacacacagcctgagtccaccctcaacatttccaggactatagttccttgatgttatgtgaactgacctctgagcggcatgttggttgtagtgtcgttacactgccatgttgcagtgatgctcccactgcctcaccatgcctgcacatgtcctttacttctttactaccataagacactaacatcttttacagggtgctatgacagttgtccccttacagagttgtcagctttttttgttttttgtttgtttgtttgtttgtttgtttgtctgtttctcaagacagggtttctatgtgtatgtagccctggctgtcctagaactcactctgtagactaggctagccttgatctcaccgatctctccctgcccctgcctcccacgtgctgggattgagccagcactgcctggctttgttgtcagctttttatagagcctaatttgtaagttgggtattatccgggtatatgtagaatacatacgccatggaatacccagggcttatactaatatctcaggcatccatagagatgttagatccttggggataagaagcacctatgagaagaggtttgtcagtcaagatagggaaggttggcaacagataggcccccaggtctcagtgactcctcagtgtggtttgttcctctgtcagcctgtgcttttcaggggcctgggctgggagaggcgtcctcccagccatggattatgagcctaaaggtaggagtaggtgtctgatgatcttcaagttggcttttgaagcctataccagaagactcaacagagttccacagacggtcttggcttgagtatatcatgagccccagttgcctgtgttgttgagtgccattattgaacccacaaacagcaggagtccttaggacacacggaacacaggagacttggtgtgggcttgagaagacacattgaggagcgcgttcattgctgctctcagtcaggcactggtctcagaaacatctaagggctgtgtctttaggactggacctcagttatctgccaagcagggtgatggccacctggtcttctgcctgttgtgtgtgtttgaaaatgaccagcaaaaagtgtgctatttcctgttcactgcccacatgtgttttctgtctgctttatctgttggtgttcctatcctctcgtcacagcttgtgacttaagtggctgctgcaattgtttttgtttttaaataagtatatgatttattttgctggacttctcttagttttaggcaattagactcttcctaaacaatgtatcaagatctaaacaatgtatcaagatacttttgttccccttgagataggatctcatctcctcagctggccttaaactagtctggaactctctctgtaatctaggattctcttgaccttttgatcctcttgggatcacaggcatgtgtcaccatgtttcttgggatctcaggcatgtgtcaccatgcctgctgtatccattgcagggctctaaacccagggcctcacacacactaggtgtttgcacccaagcagctgagctacagcctcatccttgaagatacttcttgatggtctccagagcgaattccaggacagcccgggctgcacagtgaaaccctattttgagagccccctgccaaagaacagatgctgctatacttgttgataatctctagtttatcctttaactctcacctaatctgagttcgttttagaggtggatacacaatatctttgtgtataggcagaaatctgtcctggcccaagggcacatagcccagggccagccatcctgacctggggctagaacatacctggtacagcaagggttccaggccacctagatccggtcaagctctgctgtctggaatgctgacatctccagagatgtatgagatggccttcactctgtggggaccctgctccctccctaggagaggagaggactgagctgagtcacaggtgggcagaggagtgctctggtgagggagctgctgcaaagtgtaggcagaaagcaaagactgccatgctgtgacagtttggtgttaagaagtgaggtaacaggccagggatgtggctccattggtaaagggcttacagtaccagcctgtgggcctggggtgaccccagaacccatgtgaaaaagtggggtgcagcagtgcgcccatgtaatacccgtgtcagcgatgtgaacacgggccattgcaggagcttagcaaactccaggttagtgagagatcccgtctcaggaaataagatggagggctggcaagagggctcagaggataaaggtacttgccatgcatgcctgacagcctgagtttgaccctgaaacccacctatggaaggagaaagctacctctgtaagttgtcttgtgactaccacatgctcattatcgaatgtgcaccgccacccagagtaaatggaggtccctgcttgttagtttataaaaggtagaggatgattgaggaacacacccagtgttgacctttgcctcatcacacttgtgcaaatacatgcacacacttgtgcaaatacacacactcacccacccaagaaagaaaaagaaagtggaggtggggtaggccaggcagacgacaaccatgctcaggatcctttgagtggtctcagaaaacctggagtgtaccctgcatgctctgagtacagatacacgtgtgcaaataacctgggggtgtggcttgccacacagccctgtcagatggtattataagacagagtttctgggaaccttgttttcttgtttgttttcagtgcccgggacttgcactcactaagcatattccctagcactgaactatattcccagcttgaaaaactatggtataaagaaggctgtgtcccgcatgctccggggtacggctgctccatatcttagtggggttgcaatgtgcttttcctgttcctgacacattccctagttggtagcgatgccagaaactgctgtctcccatgtataagccccacacaaaactgcatggctgagtagctgagctgaagaacgtggggtgaatgagacccccttcttcctgagccagcaatatccagagcttctgtgcacacggtaggcttctcgtaggaagggaaggttgtctgtgctggttcctaccggtgagtgtcccttcatccctatgagactgctgatctcctggaatagaggtgcattcagcccttgtctgtctggggtgccatggtatcatcaagaagctgtctgcctcctttccagcgttggcagggcctttccagacattcaaggccccagagaacctggcttttgagtctctggagccttcatgcacgtccgtccatgtgacccctctctgtctgtctgtctgtccatctgtctgtctcattgccccacattgtgttctgacctccacagatttccttttgtctgtaagcggcatagctgccctctcacttgccttcccttgtgttgcaggctctccagagcaacctgaagtattccctcctaccacggcggctcatcatcagcaagaggctagctcagtgcttgcatcctgccctgcccagtggcgttcacctaaaagccctagaaacctacgagatcatcttcaagattgtgggaaccaaatggctggccaaggacttgttcttgtacaggtacagctgcttcctgctctagcgctctcatcagcggggcgagccgtgtttcagttcagttggaaaatgacaggcaaggggccagggttggcactcagttggcagagtccttgcctagcatgtccgaggccctgggatcgatcccagctctgataagcccagtgcagcggtgcatgcttgtatttcggacgggaaaagcaggagctacatggacttcccaaagagttttaaaggaaagtggcagcaaaatatgcgtgagggaaaaaacctcacagcaactagtcatcaagccatcaccaggagatggccaccttcagaaacacctgcccccaggctccatgtatactgtgtataatgagaacccggatggtgcctgctttttacttaatggtgtcatgtgaccatctcatctcaaatgtgcatctgtctgtcaccagttaaatggttccagttgctctttaaaactcccatctgggactagggtagagcttggcctttgcctatgcaaggccctgggtttcatctccagcaactaaatataaaccaaaccaaaccccagagctcctgctgttcctgtggagtctgtgacaagggtcctgactgctcttccctgcccttcttgtctttcccaagctgtggcttattccccctactggcctatgccgccatgtcggtccggcccgtgctgcttggcctgtatgagaagtacttcctcccgctgcagaagctgctcctgcccagtcttcaggccttccttgtgggtctgctgcccggcctggaagaaggctctgagatctatgaaaggttggtggatatcatgtctgggctgcaggctcttatctgtcgggaacttgttctgtaggttggccttgaactcagagatctgcattgctctgtctcctgaatactgggattaaaggcatgtaccacctctcttagacttaaacttctttatctggaacttgctctgtgccaggctggccttgaactcagagatctgactgtgtctgtctcctggcattgaaggcatgaacaccatgcctgggcctaagcttttcatggccactactcaagatccagatcaaaagcccgtgtcctccatttctgtactgtagttcattccagattaaaaatgaaagcaattggggctagagagatggctcagttaaggttaggagcactgtctgctcttccagaggtcatgagttcaattcccagtaaccacatggtagctcacaaccatgtgtaatgggatccgatgccttcttctgttgtgtcagcagtaggatgcttatatacattaaataaataaatctaaaaaaaaaagtggttatttttgaaaaaagaaaaaagaaagcaattaaccagataatgataataatgcctagatagaactattccttggtcaacagcaaaccccagcagtaagcctcgctgggtgagatgttgtcctgaggccaccactccccttgagcacaggattcagctccattccccttcctggtgccccttgattctttgatccatacgttctgtaattttcctttcaatgctcactacactcgatcaaaatggttctcatgagacaaaccagagaacaaagcctatgctaggctcttttgaggcttcctttgccattacaattagtataaatatctttaccttagcctcagataaactcttctgacagacagggccaaaaagcagccatattcttcaccaaaatatcacaagaacagtctctaggccacactaaaattcttctcctctgaaagctcttgggtcaggtcgcacagttcagatcactctcagcaacaaaatcttctgtattcctattgggatgggctgtcaagccccccacttaaagcatcccactgctttccaaagtccccaaatccacattcctccaaacaaaagcatgatcaggactttcacagtaatgtcccactcttggtactctagatagggtttccattgctgtagaaagataccatcaccaaggcaactcttataaaggaacatataattggggctagcttacaggtttacagtccattatcatcaatgcaggagcatggcagcatcccagtgggcatggtgcaggaggaagtgagagttctacaccttgttccaaaggcaaacaggagaaggatctcaacgcccacccccgcagtgacacacttcctctaacaagaccaaacttctaatagtgctactccctgggccaagcacactcaattcctcacagacctgaccttgagaagagtcctaaatagaaatgaggctgttgtatagggcacccactatcccctgccccatgaggccatgatttgcagacacacacaggtgaatgcccacacctcctcatgtggatggagcatctcctaatgagtgcctccagtcacagggagggagggagggaaggtgggcagggttttcagttctgaataatgaggcaaagccagccctggctgtcctggaactcactctgtagaccaggctggcctcgaactcagaaatccgcctgcctctgcctcccgagtgctgggattaaaggcgtgcgccaccacgcccggctccactgtttaatctttttgacacaggggtcttgctatattatgtaacccaactggtatcaaactgcctgcagtcctcttgcctcaacctctgcctgctaagtgctaggatcacaggtgtttgccaccacatgtgaccagcacagaccttcagcacagctttggcaggacctgaacacactttaaagctctgaagtttttcactgggtctggtgacagctctgaagttagagaagctgaatagcaatgtaaaaccatgcatgtgcataaagtccttttaaatttctttcttttttatctatttctttttattttggggggaattataaagaatccctgtccatactgactgttgtgagcgatgctgctatgatcagccactggtgactgggtccatgtgacacccatctgtgatgactgtccacctgtatgtacataccccatgtgctggcactatgctcttctgcagctcctgttcctaggccttggccatatcaccctcacatgcattagggcagtgcccaggccctgtgtgggagcaaggagtcaattccagctatactcgagtgtcccccaagctccagagactgggggaatcccagtggcttggagtgctgtgtccacagagagtgacccaggctgcatttgcatctgtactgggattggacaaactatgccagaggtttgcatgtggaatgctcgggattcacctagcttagttctcgatctcccacatgacagtcacatctgtgaggacgactctgatgctgcacaggtggtggctagcatgtgtgcaggctttggctatgtggacttggtagtcatggtggcacaggaggtagcagtgaggccattaccagacttcctgcgagttctggtacattcacattctgataacaggtccgagtgtgttcccgtgtgtgtgtgtgtgtgtgtgtgtgtgtgtgtgtgtgtgtgtctgtgtctgtgtctgtgtctgtgtctgtgtctgtgtgtacattctctgacagattaacacattgattagttccccaaaggtctcttgccatcctttaaatctctgttactcacactagaagcatgttaaaagttggagtgctcttgtttgctcttttagttgataagtgagagtttgtttgaacagttgttaatattgtttaatattaatgatttttcccctaacattgtgatttttttttgacattgaaccaagagctgggtagctgcatgaatcactgaatagattcagctgccactggaagctaagccagtgtccccacacacgggaatcaagcttcctaaggtagatgctggtcaaggttcctgtaatcctgagtgtgtgttaaaggcacagtgagggagctggctgtaccagatggtttgtactgtttctgttgttctgagaaccagatccctgagcccttaggattagagcagcatcccccagccaataattgtcacgcacagataggaagaggaggatgccagggtcacagcatccgtgctgggagatgttgcgaagggctgggctaggcccagctgcgaggtgaggtaacccactgcttccatgtaggtggggactaatccatctgtgcttctcagtgagcgcaaacaaacgggcctctcggtcagtgcccgatggtatcatcatcctggctgtctctacttcactttgccaagaaatcaagattagaagaagaaaacactcctttctcagagcaggggaggtgagtgccttgatggctgtaagagagcagaacttgagaccaggtgtggtgacacactcgtgtgatcctaacactagcggggctgaggcagaaccagccaggattacagagcaactccaggccaatgttggttgtacacagtgaatcctgccttagaaatccactgggagtgggaaaggggaaaaggaaggggacgtgacatactagagatgactgtttagatcagtgctctggagtgtacacaggtaatcccagattcaggaggtagaggcaggaggatcaccctgagtttgaaaatagcccccactacatagtgagaccctgtcccaacaacaggaacagcacagtcaatggctcttcaccaggagggaaagctcagcaggccctgggactctgtctggttggggagggtggaaagggctactgctgcgtatggcaggggcctacagtgctgcaggcatctaggttcactatctgctcctgggacaaagccagccccgactcagcagtgttaggttgagaacgctgattcatctggttttgagactgcttcctatgtttccccactggtcttcagtcccagggatcctgtggtcctgtcactagcaggcactagctgccattagccagcaggggagtgcagggctgctcctgcacttagttagaaatgctaacttgaatacctgatggcggcccagtcaagacaggtagggcacacatggctactgacctctggccgttaactctctcttagtgttctgtgggtgagaggctgatggtagtaactcctgctgctgttgtaggaaatagttaacctcacacaacttttattattataataagccttaatcagcactagagctgagcagacatctaccctatctatttcctcatcaataactccaagttataatttaccttgttccatctgggcagctcttaactccagttggctggttctcgtggctgttttcatgattcacctaccccatggcagcttcctcctctttccaccttcctctcttctttgtgctccatctcagaccccgagcccaggaaccccaaacctcacctacgtctcttctgcccagccactgtccttggtttttgatggtggaccctgcccttttgcactttggggatggtctgttgcaaatggaagggctcagtgtcagtaaggagagtgtgtgtgtgtgtgtgtgtgtgtgtgtgtgtgtgtgtgtgtatacatacacatatgtgtgtacgtgtatgttctcaggctcagtgggttttatctaggtcggggcagggagttcctcagatagccctgtggtaaggagtctctaacacactgaggagcctcacctcccagggcagaggctgcccgacaggtctgtgtcccaggcacacgacgactgctctgaccagataatcatatcatgcagctgtcgagcattgcttctgcccgacactgcggctcttgctgagcagagccaagctctgtttgtctggtcagcttttaatagaagcccaatcaataccttcagccacaaaaccattctgtgtactttccctgagcccttggcttgacttacacctcctcgtgctttttattaaatccaattgtcattccctgcaaatattttatgagaccttaggatttaggctcatttaacacttgtattaacttttcatccttcggcagtttcattcatatatatatatacacacacacacacacacacacacacacacacacacacacaatattttttattccctttggccctctcagtcccccatcccagtaagaccccactacattcatgtcttccttatgtgtgacctatggagtttgaacagggttttctgaagagcataggcgcatggttatttgctggagtacgggcaatctaggaatggccacgcccatgtagatcatcaatcttaactataggtagcccctcacagaggggtggggcactgagctttcccttctctgatgaactgtcagtagtcccaccttttgcctgtctcatgcaggtgaccacgggtgcagggtgagcttgtgaggtcataggccctgtcacacccagaagtcactgtcccagcccctagctctcacagtctgtccacctcttgagccttgggaggagggtgatataggggctctgtctgggacaggcattcgacagccatttattctacattttggtcagccatgagtctctgtattagttgcctagactcatttttataaggataacagaatcagttggggtttttttgttttttgttttgtttttggttttcgaggtagggtttcactgtatagccctggctgtcctggaactcactttgtagaccaggctggcctcgaactcagatccacctgcctctgcctcccaagtgctgggattaaaggcgtgcgccaccaccacctggctcagaatcagtttttaatgtataaatgtagtatatatttggaggaagtatttttttccttttatttgtttttgaaatcaaaaaagcaaactcaaggtggttggtgtggggtggtcttcacagtgcaaactgagtgtcaccatcacctggcacttgggaccacacagggactgggcactctcgggatatctagcactgtagcctgtgtatgcactctgctgccctgtgcggagttttcacacaagcactcccattccacctctgcgaggggcagcgactcttggctccatctcttggccaagtgtagatccgtgatgagataagcctgctccaagtcccatagccaggatttgaacacaggggctgagctgggaaaccccgtgagctgctcctcacagtgagctggccctggccacctttccccctgctcccttgcaggtaggaagcctatgagaaatgctaagtgatgagtcagctcagcatgcggtgacctctctgccagtcactggcggcctctcaccagcccacatgtggttttcaataccagcaccgcagagcagggccccacttcagtgtccttggaaaaacaggcctgatctactgaaagagacgcgtcatgagctgctgactgcgtcccgtcacaggaggattgagtgaagataagagatgtgccaagccagatggctgacacctgtgaccccagcactcaggcagatcccaaaataaaggggtctgggggctaacaagtggcccagtagttaggatggctgctaccaagccttgtgtcccgaacctaatacccaggacccacatggtggaagaagaagagcaacttctccaaaggagagaaccagctttttcaggttgtcctctgacctaaccaagtctgctgtgcatgagtgcacatatatatattatttatatatataccgccatacacactcatacactacacacacgtgcatacacacatgcacgcaggtgtactaattaaataggtggggctagagggatggctcagcagttaagagcacttgctgctttaagaggcctggagtttggttctgtaactccacctttagggtatccagtgcccccttctggcctgcacaggcacctgcagtcctatgcacatacagacacacagacatatatagacataattaaaaataaatctatttataatgttataaagaggacagtgactcactgagtaaggtacttgctgtcaggcccagcaacctgaattccattcccagaccctgaagagggtctgcgtgcctcatgtgtgactggtcacatattcctgacttttcctcaggatggacttcatgggtggtgctcacacggtgcagaaggtgggaagaaacctgaaaccttgtcatctttcaccaacagaactgacgccctgctcctgagactgtctgtggttgtggggcgagaggtgttctatgctgccctgtggggcagcgttctgacaagcccttccatccgcctccctgcctccttatttgtggtgaaccacatcagcagggactcaccaggcaaggagcagaagtgcatgctgggtactgattaccagctcacggtaggtgcctcactgtccgagaggggtgggtgtggcttctccatcagggagaatcaggcagtgaggacattccaagactgaatgtgtgtgatgatggtgagctgtgaagcagggtgaggggcagctgccatacataaggatggtttgctttccatttaacattttatacttgtgtgtgtgtgtgtgagagagagagagagagagagagagagagagagagagagagagaagagtagagtccagaagaagatgttggcactctgggagctgactgggtactgggaactaaaaccaggccctgtcctgtggaagtgcagcacaactgcccactgagccaactctcccgccctggcagcatagctcctccgtgccaatggctgtgtgcacaggtactcagcagcctctgccgtatgtgcctcagtctcgtctcctcccatgccctgcgtcagtcactccctccttgctcatgtggaaactgcctcttcccctgctccaatgtcctgatgactcctgaccctgctttctgccccagtcggtcctctttggctgccctcacacctaaagctccaggtttcccagcctccttctccaggcccgtgaaggtcatctgccttccctggcagctccaaacctccccataaattttgtaatgtgagcatcccagacctttatctttcccaacccggccatgcctcctatcaccacctggtagtggacccaaactttaaataatgttctcagattaaatcaatggattacgaagtctggagctagcaggcgttgctgtctgctgagggttggtagaactttcccacaagatctttcttaggaccacgtgatggaattgaagagcccctcaggttgtgactgggatatcggagatccctgtgcgcatgtctcccactttcctgcctgtggatctggcctgcttgtcatctgaccagcctacgtctctcttgggccagcagccctcccaccggcatcctctaccccactctcaccagctctttagagattgcttttgtaaagggtggctttgcgcacacctgtcctgtgcttgtggctctgtggctcacacagtcccagttcaggacttcctagttgtctgctcccagctgatggatcacctgttcgccccacaagcctgtgtgtgtgtggctttcagcctcagtgcacccgtcccctcctgaggcactgagagacgcctttattgagagaggacacttacttggtcggtactgtcttgacttggggtccactggaccatgcgtcttcgtttggttttacgtgaggttcctatggtcgtatagccccatagtccctagagctcagagccctgttctcatctcctgtgtggcctaatgccacgtcaagaatcccagcctaggtgacttagttttatggctgcatagcatagacacagagtgtcaggtgtctctggaacaagcactgtggtgtgtcatttcaggtgagatccctgtgtgcttcactgctagacgccaatgttcttgtgcaaagaaataacctggagatcatcctgtttttcttcccgttttatacctgcctggtgagtcgtgtgtgcccttctggacacttccctgtcacttcaaaggcaaaggcaggtgctggtgtcacggagactgctcagccacttggcagtctctgctcgcctcagaccatcaatggccttttctcgttttgtgggcatcatgtgacttctcctgggaagaggtgagcagatgcctcttcatgccagatagggcaacaacgaatggctagaggatgatgtcatctagacccagcttggtggggcaggggaggcgatggttttgttagggtcactagcaggaatgtgggtgacatagagggaagggtctaccctggcatttcagagacacagaggctcccctggatacccctctgagtctcacagccttcatggaagagtctcctccccagcagcgatactgcttatatagcactgggaagggacctcgtgtatctgatagctcccttaaagttcccgcagctccctgtaccttagtctacccctccagatggaatgccagcaggcaggcattgactgactcctttggcggggctgtgtggggacagccagcctcttgacagctatcttctggggatggatggttaagtaaagccacatgtcaaaagttagaagcctgctcagcattcattccctggaggtaatgttctcttcgtcctcccgataggaccctgaggagcgagccatccctcttctcagacgggatgttgtgcacatcctctcagctgccacccagacactcctgagaagggacatgtctctcaacagaagactctacgcctggttactaggtactgagcagtgtgtgagcatgtgccccagagctggtttgtggactaaatgatgcccttagtgatgtctctgaatcatgaattgtggaaaaacagcaatgactaacacaggcctggtcagttgagattgaactcttacgggagctatggttatctgcagctgtttgtttgtttgtttgcttagaaaagtaaggaaagttttaaaattccagatgagtttcaatttaagagccagacagaaataccagaaatctgcagctaaattatatttaatgagaagcctgtataacaagatcaggagaatccctggactgcatcccttgcagtgtttatgtattcaacttgcaaacttataggcagcccttggctgttggtcggaagactcccaggaacagagctcagggacttagaggtcaaaggaaagcatttttatgtataacttcctatgtttatttatgtgtgttaagaaagtaagcagtgtggacagaacatgaagcttcaagtgtgttcagcgggttcccgacccctgagcctcaccccagcccctccacagcttcccttgatctccagggtatatatggatcttaccacactgatctcaggatccgcctcagtgttccttgtcacttccccctagttgtgagatgtgcaaagtcactgtaaggaagcgtctatgagcactcatttcaagatgagtaactgcaggctcgtgatattttgttgttggtattttgggggcgggggcaggatttcttgtgtctcaggctggccttgaatttacaggagagccttagaccttgtacttctggtcctccaagcctctgcctcccaagtgctgtgattacaggcatcaagacagtgtatacagcactgggcaggggtgggggtggggtctctttggaaattttagactttctaaaaattgtatgtgtggccgggcgtggtggtgcacgcctttaatcccagcacttgggaggcagaggcaggcagatttctgagtttgaggccagcctgatctacaaagtgagttccaggacagccagggctatagagaaaccctgtctcgaaaaaaaacctacaaaaaaaaaaaactaaaaaaaaaaaaacgtgggactggagagatggctcagtggttaaaagcattgactgctctccaaaggtcctgagttcaaatcccagcaaccacatggttgctcacaacctctgtaatgggatttgatgccctcttctggtgtgtctgaagacagctacgtctacttacatataataaatannnnnnnnnnnnnnnnnnnncctgatctacaaagtgagttccaggacagccagggctatagagaaaccctgtctcgaaaaaccaaaaaaaaaaaaaaaaaaaaaaaaaaaaaaaaaaaaaattgtgtgtgtgtgtgtgtgtgtgtgaaaacatatgaatgttgactgtatttgagcatataagtgcagtgcctacagaggccagaggaagctgccatatttcccggagcagggagttacatgctgttgtgagcctcgtaccatgggtgctgggagctgatctcaggtctctgcaaaaacagtatgtgctcttaacctctgaggcatgctccaggccctctttaagatttatttggttgttttttgaaggatgagtttgtaagtgctcatctgttagaacatgggattctagctgggtggtagtacacgcctttaatctcccgcaatcaggaggcagaggcaggtagatctccgagtttgaagccagcttggtctataggacagccagcactgcacaaaggaactctgtcttgaagaagaaaaggaaggaggaggaagaggaggagaaggaggaggaggagaaggaggaggaggaggaggaggaggaaggaatgtaccattctgtgtatagggaaagtgccaggccttgcttatctgtgactgggaacctcgagtttctgcttattccacaaggatggtcttccttatcctgaagatgcactaactgacccagagcccagatgagggcatgcagacagacaggcaggcaggcaggcggtctgccttgctgtcaggtagtgctggggaagtcaatcccaatggagaacgacctctgttgcagctataaacatgctgtagaagggcagtgagtggttgggcaaactaggctgatgctggctgggctgggagtctccctgcctgctccttagccaggacaccactgtcagatgcggctccgtggagggcacttcctactgcatgcccctccctgagaagggaggtgtgactctgtctgactttgcctgtctgttgaaggaattgtacttactaaaataccacagcaggaagcttttgcacaataccgtatctttttacagcttgtggtgtttattcttttataggttcagacattaaaggaaataccattgtgccaaaatctgaaatttcaaattcttacgaagaccaatgctcatacttttttgataaatactccaaggatcttttagttgaggtaaaaccatttctaaaaatggaaatttgaccataattagaacatttcccattaaagtatttttctttttttcttcctttctgttttttgggctgggttgggttgggttgggttttttggtggtggtggtggtggtggtggtggtggtgatggtggtggtgatggtggtggtggtgatggtggtggtggtggtggtggtggtatttctttaagtcagtgtcacatttcccacattggccttaaactcactgcatagcctaggatgactgtgaacttccaatcctccagcccacctccaaagcgctggtgtgtgccactgtgtctagtttatacagtgctaggcactgaaccaggacttcatatgtgcccggcaggcaatccatccactgatccttatggcttcggtgcatttctcggagtcctcaaagcagacactgggtgtgatccctgaaggaccaacatgcatgtgttatgggctgaggctgctctccattttcttccagagtgtttaaccaataatgccgtaccctaccatatatattctaaccctaaccctcccacataccgccccctaatgtgtgctttgtgaacaaacccacaggctctggctgagatactgcaccagaagttcttagacgctgacttagaggagcgccaccatgcatatctgaagcctttccgaatccttgtcagtctgctggacaagccggaaataggtaacatgggaaagccactcactgccttgggacagatctgcatcactgttcttagaaactccctcttacacacactgtgacccctgaccccaagaacctgttgagggaagtgacccctccctctgttgcttttcactatcagttctgatgtgcagtcaccagagcccgataacagggcagagacacacacccccccccaccatcccctatccgtccagtgcattgcaagctcaggagtattgtaagaggccagggtctgtgcaccttctggccagaacaaagagccaggagcattcttaggccctgcaaccgtttggttgttaaccagagtgaggccctgaacatctgtgacatctgtgacatgggctctagggcagcaagagaggacagtgattccttgtgaaggtggaaggggcacccaggtgctgggatgtctgtacgcttttgctttgggttttttagatagtccatcatctcctgcatctgcctccaaagtcttgggatggtagacataacaccacattcaatctagttctctaaaacgcattgcatgtattgcgtactgtgcatgtgtgtgtgctctcgtgtgtgctcacgcacacatacggtatacatgctgaggtcagagggcagctttcaggagcctgctctctaccatgtggtcctgggagttactcgggttgttagtcttagtggaaggtgtctcagccactgagacatttagacaggtcctgcctttttttttttttttcagcagtaattttgttctaggtgacttgcctgtgtcatgtttctccacacctccaacatggaggtggtacctcttgtagtacccattttacagagggagagttatttgcccgaggccacccaatgcccaagccttcctttcgggaagcccgtctggcctggcagtgctgagcaccgacgccctgagatgctcgtcacgtgacaaatgcgatcctgctgagctgtgagcccctatggcttaaccaacccatagtgtgagcctttcctgctagaagcatctgcgctggactcagattctcttgtcctcccctcccgcctccatcagctaacaacggctcacgataggtttctctgtacctggaaggaactctggctctgtagagtcacattttagcctgtgagtcaggtgccattagcacgtttggagcgtgccgtgtggcttggggaggttttcaaagaagacgcaggactcagtattaggaggtgtatgttttgtgtgagagctgtcctgcggagagccagacagcgctgcctttagctaggctctaagtcatactatctagacaagggagcgtgcttagcttcatttcaaatggttgttaggtttgctcttctgcctggcttagttgtctaagggatgtacccatagctagacaggttgattgtgcagaaacaggaacacaaggcggtcactctgtcctaggtcctgtccattcttaaaacaggtaggctttagccgcgtcttgtctcccccatggaggagggctgcagagctgcctgtggtaagaagagagcattaggcacccttccagcacagcgtttatgaaaaccattctgtcagaggcacgctgtgattctgtgagaagccttggagggcaggccagtgggagagcagttgcttggtgaagccacaggttacgtcacagcctggaaaatcaaacccatgaaagatgagtgtgctgtcgccatttgcacagcgaaaagctgagagtgggtaggctctcatccctctgggtatgctcatgagaagtcatctttggaaacccctgccccgtgctctaccccgtgggccaggataccgctctgacatgcgactgggacagttccgtggcccctcgtgagcggttcagtgttgacgttgttttgtgttcctgctctgagtggaaagagctgagagcagggcagctgctccttctctgtgggtctctccccattgatgtcggccagcagctcacaggtttggaacatgtcacgttcagcagcctccacccagcggacgtgagctcaagccactcacctaacccccgccccggtgacttgtcaccctgtgtagtcagggagagcagcacagcccctgctcagtgtgcccggacgtgacggcatcacacacacagtggcgctttttgcgtcgctctgctgctgttgcctttgcccttgtcgcatctgtgcgtcttagaagccatgtgtatggaggtgctccatgtgctttgtgtgtgtgcctcggtttggaaccgagctcacgtggaagcgtgcctacctagcatgcacacagcctcttacccacaagttgggcatggtggcagaaccctagtatttttgcagcaggtagaggtagagacaggaggatcagaagtttgcaataatccttggctatgtagtgagcttgaggccagcctgggctagagaccacatctcaaacaacatgtaagtatattattacccttctctaactgttttctactaatttcaggacctcaagtggttgagaatttatttctggaagtcatcagggccttttattcttactgccacgatgtcctcggctctgaccttaagcttagctacactcagagtgggaatccactaataaggtacgagctcagcttcctcatctcagtcaccctgccccatggtccttctctgcccttcaggaagagccaggcagtgctgagagggtgggcaggccaggggtcagagcacccatggcagcttcttccttctctacatgaggagagcttagcctggcccctccctcagctgcaacagtgagtgtcatgcagcaaaggccacgtaatctattgtacatacatggtgaggcccagggagaaggggaatgggaagatggtggaaaggaagttcagaaataagggggagaagagactaaggcagaacaccaagggctggtcaagatgctagaaggggtgtctctgggttccattaggcagattgaaccattagctcaaggccatccttggctacatactgagtttaatcactatgtagccaaaaacttacttctcctcttttctcgttgattcatggtaaagtcccgagcagtatgtgttatactggttttttcctcactcaaaaaaataaaagggctttcttttcattctttctttttaaacataaaagcagtagatgtttgtgtagaatagcctgatatttgaagctatcaaaaaccaacaaagacattgtcttccataatccttccatccttcaaggagaaataaaaggttctcacttctttctgtgtccctcctacatgtttaagcagctcaaccccagcttccagcccaaaggcagggttgcatggtgtctaagtacagccatgaccagcactccactgtttgctgtggaatgtgctgaccctcattgggaacctgtcattaagtacacagaaatcttaccgataaacactaccttgcacgtggcttccacctttttctgtcattaaatagttatgtatctttgtgcatccacgtgaggatttctgtagcattccctagagtgctttactgagccgcataaaccatttaaaccatcagcaatgtgctgaggttgtagctcagtggtgggacacttggctcgtgtgtcccgggccctgagcttgacatccagcatcattggaagaaaggatataaaactgtagccaaatctccctgctgaccctgcagttgggcagggagctgagtgttacactcttcccaccggaaccctttcatctgttacatctaggaaggacactgtttcttcagagtcacagctgcccgcaggttgctgcccaaggttgcccacattcatgcaggcactgataattggactcagcagattatttacagaaagaaaaaagaggaaatcgtacatgaaggagggagggacaggagggggcagggtaggcttaatttgctacatttcctatatgtataaaattgccaaggaacagatagaaaggctctagaagccattattcaggagcgagggcactgtggaaatgctttctgggtctgtcagaggaggctgcttcagacaaccgcactctgtaacatggatccttcggtggtgtgttcagccaatctccctcttctacttgcagcacaatcaaagaaaacagacacgcctcagagattgtgaagacggtcaacttgctagtctcatcgctcagctcagacttcctgtgggattacatggcacggcgtttcgaggcatgcttcaggtgagtgacgtgtgaacagggagcaggtagatagatggctccgtggctgcctggaggctggggtctcagcccaagtgactctcagtggtctctcctgaccgccagagtccagtggacaccaggctggaaggaaggcacacaggactctaatcataggacagagtctgtctgtgtcgcaggatcctgggccaccttattattcactagggtctaacttcagaaagccctctgcctgttccctagtgttgatcagtgcagcttctgcaagccccgggctttgctcaccttaggcacagtctccactgctaagctgtgctcttcagtcttaaatccctgctgaagttagtgagtgatgggtcagagtgctcatgtgttaggctgtcgtgatgagctttgtgccactgtgaatcctgtgtggatcctgcatgggcttctcctcctacccatgtaaactttggccacctgtggctacagagcctgccatgaactcctggccaacctcttgagaagtggcattttgttttcttgatgtggattggagagataactggagcccagagacatgcagagagggtcttgcccagcattgcaccgcagatcagtaacagcgaaaatcagaactcagccctgcccagtgtaggcgtctgacttttcaactgctcctcagtgcctctctgcccccctgaaaccggcgcaggtggcctaccccgatctgagtgggttgtcactgcacccagagccaacagcagggcagcagacaggtagaggacacggggctcagctccagttgtttcttctttcttttgtcagagttagagtcagactcgggggcctgtgctcagcctctaagccacacccctgcccttgttctgtttgtccattttgaaatagatctctcactctgtagaccaggctggccttgaactcacagaggtccacctgcctcagcttcctgagtgctggagttaaaggttgataccacccctgccctgctgcttgtttgactttctgagacagagtctcgctgagctgcccaggctggcctgggacttaccactctcctgcttcagcctcttaagtatctgggattacagactgtaccactggtgtgggctaataatatgtgtgtatgcctgcgtgcgtgcatgtgctacagcgctctgtggctgtcagagacagctcggtgcagtcatccgtccacttctgcagcaggtctggtttgtgttgctgctcctcttattccaggctcctggcccatgagcttctggagatcctcctgtctccacctcccactgtgaccagaggtaacttatgagagagtttggcttgtggttccagagggtaagagaccactatggtcaggaggcatggtgcacgcagccatccatgttggcaggacaggaagctgagagcacgaaacagtgaacttcagctctcacggcctcagcctcagtgatgttcttcccccagctgggctgtgtgacactgcctgcccagacctaaccctgcgcaaacagcccaccacatgcccaggactaagggagatgtgtctcattcaaaccaccactgtctattcctgcatatttagaaacaactctggactccagagaccagcactcaacaataggttggccaatgaagctagcagtacttctccaggggtcacacagctcagagcctgtgacctcatgggtgtcccaaagaataacctgggcatggtggcacacctttagctccaggaggagggagaagcagacggatctctgtgagttcaaggccagtctggtctgcgtaccaagttccagtgtcagccaggcctatgtaatgagaccttttgtcaaaaacaaacaaacaaacaaacagtggcctctggcccatgttgaatgacataggctgttccctcagatgggtctttgaattggtactggggacttgagccacacacagtgacatcgccgtgtgtctgctgagtgatgagttcacacctgaatggacaaagttcaggtcaaacagtttgcttccgagacatattcaacagggcactcgctgatacttacccattttagtcagtctgtcaccaacactgatgtgtcagacccacagacactgtcctctactgtgtttaaaacagaataattgatggaaatcataaggtgtttgaaatggagccagtgatgtttgctcctgcctccaatttcaaaacctgggaggctgtcagggaggtcctaactcaagaaaacaaccttgaattccagcacagggaagcagagataggcagagctctgagttccaggtcagcctgggctacagagtgagttccaggacaacagggccacacaaagaaaacctgtcttgaataaaaaggggtgggggaggacagagttttcagtgactgtggaagggttaactctctctcctgtgcttaacacagaccagtgacacaaaccacggctattggagaagccatcagccctccccccaccgtctcggagctctgcaccctcctggtgttcctcctggatgtaattcccttggtaggtgcactggatgcctgctctcggtttccccctcagctctctttggtctttccagcctgttctgttcatcctgtgtgtatgggcaagtgactgcacacgcacaggactatctctgggtccgtgtggtgtggtgtagatggatagtcacagttctttttcatggtggtcttctacctctgagctgcgatcccaggcttcttgcattcttgctggtttggttttctgttctgttctggtctggtctggtctggtctggtctggtctggtctggtttggtttgggctggctcatttttctattttaattaaaaggattcgtttctgggcctagctaagctaaagtgtggacaccagtctgtgaactggagctgcagttttagaggtgacagtggacacatttaatgtagactgcatgtggcagtgttggaattttatccaggagataaactcagcagaaggagagggcacatccttggcttggggttagtgtgaaactgagccccagacagtctgaggtgcttgcttctccacggtgagtaactgctacttctgtgttccaggaactctactctgaggtgcagactcagtacctcccacaggtgcttggctgcctgctgcagcctcttgccgaggaggtggaggccctgagcttacctgagctcacacacgccttgaagacatgtttcaaggtgcttagcaaagtccagatgccgccctcctacctagatctggagcccagcagcgggaactcggtatgtgcttcaggatgcaggcatggtcggtgcctcggaggagtgggaggtaatcagcacggagatcgctgtggacgagatgtgcagccactgagttgaggatcttgaaggtttagtgcagatgatcttcatctcgccctctctggggtagcatagactccacgagtggctacacatgctaatgactgcagcagcccttccatcatgagtgtgtatgcatggggcttgactcacttaacatgcaagtcagagtgtgccctccattggcagggcagcttcaggaacagaaatctggcttctgagtttgaagctcagagctcttttctctcagtgctgtgtgaaccttcacaagcttctcctgggtctgctggccatctgtggtacttcaggcttgtcacaactgtatggcctctgccccatctctgcatttacatgtacatggtgttctgtgtgtgcagtctgtgcctaagttcccctctttttatgaagacacagcctgtttggatttaggtcacccagatgcccccacttaccagccattaacagcctttcctcagataaggccccactacaggctgcagaggttagggcaaggccccactacaggctgcggaggttagggtttgaacgcctacctgggcagcacatgcatcataagccacactgtgtggccactttgtctgccactctgtctgtcactctgtctgccactctgtctgtttttctctgactgtgccacaggtggatccttgtctgtttgctatagcagtatctagtttgtgatttctgtgcacctccctgtgtgtggacttgtactgtaaccatttcccgtgaccaaggtcgagaaggtttgcagtcagggtgccattgtctccaaaggatacagtttggtccgtgggctgcaaccgaagggtcatgagtacatccttgaaatggtgagaggtgctgccatgccaatgaacacttagtgtttgaggcccaaggggagcattgaggcagacagctccctaggggcgagagctctgagaaaagttgttagtgctgtagacagacagaaaaacagtggcatgtggaggtctgaggagaggtcaggccacatgcgcagtggcatcttctggctctcactggagagaaggtgggaaggagatgggaaagctcctgggtttagtggttgattggttggttttttgagacagggtttctctgtgcagtcctggctgtcctggaactcactctgtagaccaagctggcctcagactcacagagatctgcctgcctctgcctcccaagtgctgggattcaaagggtgtggctgcataaattcctggttttagtctgcagttggccaccactagttgtgaccagtgaatccatgtgtcaaatgatccctaagtgtctttccaggctggccatcgctggggggtcaatagggcagggaaggcaagaatctagagaaacaaccaaattactgtggttactgtcatcagcacggttcctgcacagcggaggagcctgcgggatgagagatggggcgttccttgtctttcagagtccagtaaaaggaagaaacagtggcatcgctatggaaacggaggccgtggtggcgggtgatgaggaaccttcctttcctccactgaagtctgaagacagtgggattgggctcagcgcctcgtcgccagagctctctgagcacctcagggtgcctcgggtgtctgcggaaagagacgacatctggaagaaagacgggaccatgcaggcgacatttctctgcatccaggagctcattgcaaactttgccagcaagaacatctttgcagcgtcgctgactgtgtctggggaggaaaacaagcccgaggagcccccagggaagggcaacaagggccagacacagagcaccgagcaccctggcaggaagagctcctgggaccctaagcccatcaccgtgccccagtttaaacagatgctttcggacttgttcacggttcgagggtctccctttaagacaagaagctcagagtcgctgtcgtctgtgcccagcagcccacacaggaaggcagcaaccgaatggggtgttgaccaggtggtcgttgagttggtgggctccaaggaagactgcagggaggccttggctgccgcctgccacctgctgctggactgtgccaccttccctgtgtatctgtctgaggaggagactgagcagctatgtgagacgctcttccagactccaggtaagagggaggttctcccagggtgtggtcagtccgttgggaattctgtgacaggctcgatgctcaattacacagtcatgtccacccagaagggggcagggaaaaccctcttggtccaaatgatcagaaattcaaaccttttgacacaggtacatggtttggggtcattttagatcagggaagatcacccagcaactctgcaaacacccccaaatctgaaaactctggaatcagaagcatgttgggcaccaagcctttggttcggggctctgtgcgggccagcccatttccttctgctctgcatcagtggctgttgtatctgcttctgactcctgtgtcaactgtgtctgacttggcacctagtttctgtgtagatggggctggtctcaagctcacagagccatgctcacctgctcccctctctcctctggctggtgtccttttaggagccagcgattgcagttttcctccgtggctgaaatccctcatgacaatttgctgctgtgtgagcgactgctccctccagaacatagccatcgccacactgctggaagtgataaaccactcccagtccctcgctcttgtcatcgaagacaagatgaagcgctacaaaacctctgggaacaaccctttttttggcaagttacagatggtgacagtccctcccattgctcctgggatactgaaagtcattgccgagaaaacagacttctatcaggtatttcccccagggaacatgtgtgtggttcatggccgtttcctcggactagaattgctgactggcaaaggggttgagcttgtccagtgtcatttgggggttggagggacctgggaccggctggtctgtctccaatcccagctcctcactgtctgtgcctctcagcaggccagggcaatagcttctggtctctctcagcatgtagcttttaccctataagcaggctctggcaggacagttggggcccagcactgtgctgtaccccggcaatgggacagttaaggtcttgaccaggcaactcctggtgggcttttcctttgtcccagctgtgtcttgtgacgtgatgatgggtctcatgtagtaaatgtgaatagaagccagtctctaggacaggctcagatgaaagggaaaaggcacaggtgtttccatgctttcgtggtctccactcccttttccctgcagagggtggctcgtgtgctctggaaccagctgaacaaggagacccgtgaacatcacatcacctgtgtagagctgttctaccgcctgcactgcctggccccgactgccaacatctgtgaggatatcatctgccatgccctcctggaccctgacaaggtgagccttgcttgcatctgtatcctctgagatggccatcaggctgctgagtctgtcccactttacctgcccaaggcaggttgttcccactcaagctaagtctctgctgggctcagtagatgtcccgatgcacacaggtgatctgaaagcaggctggcagattcctgggagcttgagccgttgcttttggggtcctgatagtgcagttgtgtccaagttgaggctcaccatagaattctgacctgattccctgaaagtcaggacgtgcaagcctctggagctgttcgtaaggattcctacttgcagagagttcttgtctcctgagaggttcctgcagttgattgtccttgttctttaaggccatgggcctgatactttgagaggatatgaagaaactgtgttctgtgttttccttggaccacagcacttcgatgtgattctggacacagactaacgccaggtccttttaaaaaaaagatttatttttattttatgtgtatgttttgcttgtatgcatgtatatatgcatactctgtgtgtgggtgtgtgtgtacatgtgtgcgtgccttgtgcccatgaaggccagagtaggccctggctcccctgaaaaggagttgcagatggtcatgagcaccacgtaggggctaggaagtgaacctgcatcctccccgtctccagccctgggtgccaaatcttaaacacataattcactaagcacacatctaaagccaggagagggagtacacacctttaatcccagcacttggcaggcagaagcatctctgtgagttccaggacagctgtggctgtgcagagagaacagggaagtgggaggaggcagcactttctcttctggccgaggcttctctgctggctgcttttgttattcacatatttttacatttatgaatctgtgtgtgtgtgtgtgtgtgtgtcctagcacttgtatagaggtcaaaggacaacttggaggagtcagttttctcctacccttgtggattcccgagattgaactcatcctactggacttggccgtgagcactttttacccccaaaccatttctctggtcctgtgctcattatttaaatgacacttggcgctgagcctgctgtgacaggggtatgatttctttatgggaggctggggcaggagaattccaggttcgagaccagcctgcacaacttggtgagaccttgtgtgagaattatttatagataaataaataaagcaagcaaacaaggttaaaagagggtgggagggtagggtggagcagctgctaggcatgttcagggctcaacactagtaccagagagagagagagagagagaagcctatggtgactcccacagcattagggtgaaaccaagcccctccatttgtttcttcatccagggaacaaggttggaagctctgtttaggttttctgtgatctggcacctgacacgagaaatccaaggtagtcgtgtgacgtcccacaatcgctcctttgacaggtaaggcggttcttcattgtgacccactaccctcggccaagggagcactgcagagacccctagacatgcattaggcttcagtgggagcagcagcaaagcagccagcaggatcatacgtgggagtccatgctgcagaggacagagtacccacggtcctctgattccatgtagcccggtgtgagactcttacgggggcatcagtgtggtggggtgagggagcccaccctcctcagaatccctgtgaggctttgcagttggcccagatgagaggacgcccagggggatgagcctggcccagacctcatcaggccacccatgctcggtttcacttgctgcatcagcacctgtgtgcataagatgtgttctttggtgaattagactccgctttgtccttgccctatgcccactgagtctctaaaggcacagccacgaagccaggcacacagcctgtcactcacttggtatgtaaggccagtatgatgaagctccctggggtatctggttcaaccacaggagcttactgcaggccgtggtgcctgccatgcaggagcggcagagtgggaactcggtggcatctctccccacaggtccttgtttgtcgtcctggatagcctggcttgcacagacggtgctatcagtgcagcagcccagggctggctggtgcgagcgctctccctcggggatgtggcccgcatcctcgaacccatgctcctgctgttgctccagcccaaaacccagaggacgtccatccagtgtctcaagcaggagaactcagccggtgagcagcctcacagtcctggggggcgggggaggcaacaggtgctgcacccactgctgtgggtgctcaccgctcacacgagtgactgtgccttggaaactgatggggacattcacattttaagcaccacaggaattagcactttggaccagtaggtgtgggttgctgttttcactgaaaagtcatggctttgttactgagaggaaatatttgaatcatgcaatatatattattattagctgtggtaaccttgctgtgcaacaggacactaaaaactcaccctcttaggtaagagtctccataccctctggccagcatgtccccttgccttcctcacccagcctctgctcttacttcacctctgtgggagtagattctaaatgttgtcactataaaagagatggcaaggtgagttgtgtgtgtggtttgtttaaccacccatggtataaatgcacatttagaaaaccacactgcatcctgtcaagatgggaacgtgtcatctccaggtgatacactctttcaggttagtagcccacattttaataagcacagggatgctctattgtttcacaggagaaaacattccatgtgtgtctctagtgcacagtagaaccccctcaccagtgccccttgcctagcagaggggtggtgccgggtgtaagcaccattgttaatggaagtccccgaagcccctctgcatagatttgtacccctagtctgggacagtttccggttactaaaaatgtcaccttcctatgaaatctggtcagttgtcccttatgtttgtcctagtcttacggggagcaacagtgccaccctaaggtgggtggagggaaaggaaacagtctcctttgtgcaaggctcatcccaaacctgcagtgggggtggagtggggagtggcctaccttctccaagagactgaatttattccacagcctagaaaagggatgattggagaactacacactacacaccttcattatgctctgcatggcagctctatactttagtatttcttttgtcttttgttttatttgtatgtgtgtgagaatagatgtgtgccacacacacacatactgtatgggcacatgtatgccatgatgtgtgccccccccacacacacacatactttatgggcacatgtgtgccattacacctgtgcagatgtgtgcccccacacacacatactgtatgggcacatgctgccatggcacctgggcagaaggcttttctctctcactgtacaggttccaaggatagaactcgagccatcaggctttgtggcaagcaagctgtcctgccagccagctcccgcccctcctctttctcccttaaaaaaaaaaaagaaaagaaaagccccactgtgtggttcttcggtttctgtctccccactgcctcattacttcctgtttccttcctggtgccagtgtagctgctccctggcagtacaagagaatgaagaaagggaggtgccgcctgccttgccatgtctgtgctgctatggactgtgcgctcacaggctgtccgtttctggcttgcaggctgtcttgtctctggcttgcaggctgtttgtctctggcttgcaggctgtcttgtctctggcttgcaggctgtctgtctctggctcaggctgtctgtctctggtttccactgttccttcctctcttcaccctgcatagacttgttgaaaactactttaccaagaattttcatagtatcaaaatctttggattttcacctctcttaaaaagagaattgatgggctggagagacggctcgggttgagagcaccagttgcccttctaaaggacccaagtttaagttccaacacccacatggcagtttgaaactatctgtaattccagttccacgggatctgatagcctcacacagacatacatggaggaaaacaccaatgtaaatcaaatttaaaagagagttgtatttaaaagtgctgtatactttcttattgcagaagtgttactgtgtctttttaaaatttaggtagcggcataggagctcacagctgcaattccagcatcggtaggcttgtgacaggaggggcatcacctggagactgtttggaccattagcaagctcctgtttaaaatgataacaaaagtgaatcaagctggcacggaatgccaactgggtgacagcactgagaagacagtccctggagcaagctgcctagggagactagccatatctgagagtgctgagctgagacgccagcccaggcctcctcacatgcacacacatgtacccacacacatttgagcatacagtgcataaacacatacagaaacaccatgaatgcacacatacatgcgcagaaaaaaaggaagaaagaaaagaaaagaaaaaaatcctccaaaaaattcagaagtaaaggtattacacagagatcccgacagtgtcagcggatgagctgggcaatgctggtgggtggcagatgctgtgtgagctgggcactttctccagtgggctccttgtgtagctggatgctccctctcacgtccctgtacagacctcatagtcatgggcattggcacgagctttacagcccagcggcgtgtcaggtgcaggcatgcccctcaccattcctgcgccctttctgtggctctggggtgggcacactctccattttctctacatactgttctagcgcgtgccccatcctcacagctttgaaacctgctgatgtttctgtggaatacatttccaaagagggaattcctagggaaaaaatcacttatgtttttccaaagtgtaactaatgctcacaatccctggatattgctaagagccgggtgcccagtgcaccaaccccaagcttatgcggtgctggggatcaaacccagggccttccatactctaacttgacactctcccaactgagatacctcttccagctaaaggacaattttacaatgctctgtctctgttttgcccatgacttgatacagttccagtgggcattgtctcctttaagccaacgatcacctcagagctaatttgtcatctctagcaattctggtttaaagtcctttgtcattttgtgatttccagaggatttacaccgttggtttaacaggaagaagcccacgtgcaaagaggcgtgtggtgaatctgagccgcaggagggtgcccctgaggaacgcctgcctcgaggacagttcaccaccgtggatcgagaagccatctgggctgaagtagagaaggaaccagagaaatgcccaccaagaagtgatctaagtgaggaagacctgccctactatgtggaccttccagacaggatgacctctggtggcggggatagcagtgagcacacagagtctgcagacacgagctctggccacactgacagtgagaacacatccactttctcatctccctcccacgatctgcaggacctgagccacgaggaaaactgctgtgctccgatccccatcgggggcagggcatactccaagcgagcggccttgctggcagccttccagccagaaagccccaggtccaatgccaggttaagcctggtgcgagcagactcagacaagacacaggcttccgagtcgttttccagtgacgaggaggctgacgtggagctccaagccatcaccacatcgaggctgttgaagcagcagagggagaagcaggagacagtcgaggccttgttcaaacacatcttgctctacctgcagccctacgactcccagagggtcctgtatgccttctccgtactggaggccgtgcttaagaccaatcccaaggagttcattgaggctgtgtccaggacgggcatagacaccagctccaccgcgcacctcaacctcatctccaacctcctggcacgccaccaggaggccctcatcggccagagcttttatggcaagctgcagacccaggcccccaatgtctgcccccactccctgctcattgaactccttacctacctctgcctgagcttcctccgctcctactacccctgctacctgaaggtctgccacagggacatccttggcaaccgcgacgtgcaggtcaagagcgtggaggtcctcattaggattacagcacagctggtctccatggccaagtcggcggaagggaagaacacggagttcatccacagcctgctgcagaggtgcaaggtccaggagttcgtcctgctctcgctgtccgcgtccatgtacaccagccagaagcgctacggcctggccaccgccgaccggggcggcaggctcctcgcggaggacagcctctttgaggagagcctcatcaatctggggcaggaccagatctggagcgagcacccactgcagatcgagctgctcaagctgctgcaggccctcatcgtcctggagcaccacctgggccagggccaggaggaggcggagactcagccggccctatcccgagagtggcagagggctctcaacttccagcaggccatcggtgccatgcagtacgtgcagccccaccccctcacctcccagggccttctggtctcagctgtggtgagagggctgcagcccgcctatggctacggcatgcaccccgcctgggtgagcctggtcacgcattccttgccatactttggaaagtctctgggctggacagtgacaccctttgttatccagatttgcaaaaatttggacgatctggtcaagcaatatgaaagtgaatctgtcaagttcaccatcaggtatgctggaatcttattggcagattttgtaataaatgtctctgttgccaaggcagttgaaagataatcaacccctcagaaggctggggactgtcatcagcaggagtgtacctgcttccatcctttggctttaaccccacatgtctcctgctagcatctatgaacccgagggtccatctggatggccttacatacatagtatacacgggtgagctctgtgctaattgataccctgtgtaaataaatccacacagcaacccaggccttctcagaggtgccagccagttagttaactctgttagttttgcaaaatagaaataaacaaaaccagaatcagctttagagtaactctaaaacacctaaaaccatttttcagtagtgactttataacataaagcagcacccaaaatgcccgtgctttcgggagcccagtcagtcaaacacagcgagtcgatcgctgtgttctgtgtttacgtgtcaggctgcaaccttcatggccttatgttctttcaaattctcaaaaccaatttcttgttttttaaatattcttctaatacttaccattgtgtgtatgcgcgtgtgtgtgtgcatgcatgtgtgttttcaaggacaagatgggatgctgttcttttcttctaagttggttctgggacaaactcaggtcaccacctttaccccccattattttatttaacaatttctcatttcttctccatagtacaacctcaaagaaggaaaacatttctcctgactacccgctcactcttctggaaggtcttacgaccattagccatttttgtcttttggaacagcctacccaacataaaaaggtacatttccctccccgctagaatctgaggcaaattgtttgttttgtctttcctcgactgtgactgtgttatgtacataatgatacatgaatgatgcaaatgtcatgcaaatatatgtgaactgcaaatgagaatataaatatatgaggtctacatgtgtgcaatatgcaaatatgcaagatattcaaatgtatatacaaacataggtgtgtatacacaagaagcaaaagtcggtgnnnnnnnnnnnnnnnnnnnnnnnnnnnnnnnnnnnnnnnnnnnnnnnnnnnnnnnnnnnnnnnnnnnnnnnnnnnnnnnnnnnnnnnnnnnnnnnnnnnnnnnnnnnnnnnnnnnnnnnnnnnnnnnnnnnnnnnnnnnnnnnnnnnnnnnnnnnnnnnnnnnnnnnnnnnnnnnnnnnnnnnnnnnnnnnnnnnnnnnnnnnnnnnnnnnnnnnnnnnnnnnnnnnnnnnnnnnnnnnnnnnnnnnnnnnnnnnnnnnnnnnnnnnnnnnnnnnnnnnnnnnnnnnnnnnnnnnnnnnnnnnnnnnnnnnnnnnnnnnnnnnnnnnnnnnnnnnnnnnnnnnnnnnnnnnnnnnnnnnnnnnnnnnnnnnnnnnnnnnnnnnnnnnnnnnnnnnnnnnnnnnnnnnnnnnnnnnnnnnnnnnnnnnnntacaatcagccggtacctggtgtgttgtgtgtgtgtgtgtgtgtgtgtggtatgtgctgtacacacaggcacattcgtaagcctgtgtacgtgcatatgagaccagaggaagatttcggttcttcctctatagttctctactttttgcctaaaatgaggtctcactgagccagaagctgtctgctttggctagtctgccagctggctggtgagctcccaggatctgcctgttcctctccagtgctaaggtacaaacacacaaagctatgcccagctttttttttttttttttttttttttttgagacagggtttctctgtgtagccctagctgtcctggagctactctgtagaccaggctggcctcgaactcagaaatccatctgcctctgcctcccaagtgctgggattaaaggcatgcaccaccacgcccggcttttgcccaactttttaaatcgatgctagggatttgaacacatgtcctcatgcttgcacagaaacacctttcttgctcattaaaccatccctcaccctgcactcatctagtgtaagtgatcttttttaacctcctgatgtcgtgatgggctgcttgtgaaatctgaaatctgaaatctgcttgtgaaatctgagctgctctgctgttctagctaagtcttaggacaaaagcttggcctagtggtgcatgcctgtgtggagggaagaggatcagaattcaggatcctctttagctaagttaagtacaagtttgagaccagtctgaactacatgagaccctctcttaaaaacaaaacaaaacacaatcttaaagtatacccactgttttgattattttttaaaactttatttaaactgggcaggtggatctctatgagttcaaggccagcctggtctacatagcgaattctaggacagctaaaactatataatagagagtccctatctcaaaaaagattataacgtgaagctttgtatcagctctgtctcaagcaatggattgatatatacagggacagatgtcacttccagactgcctcatgggcggtaatccaccctacatcccagcagcagcagcatccccaggggaaaggggacttggctggggcagtgagcctcaggcacccatttgaactttcagactgctgccgtaagcgatcccatcaacctgagaaatgccaagaacgccattttggaagagctacctcgaatagtgaacaccatggcccttatctggaatgttctcagaaaggaggaaactcagaagagaccagtggatctcctgggagccaccaaagggtcatcctctgtttactttaaaaccaccaaggtgaggccttccttgggtctgttggtttgtgtgtgagctgcacccgcacagcctccagagtgctggaatctcagctgagcaataccctgttgcttttctctctggctgcatcgttccccgggtctctataagccaggattgggggcacatgcctgcactccagcactcagagaatagcattgctgcaagttggaagccagatggagctgcacagtgagctccaggccagccagggccacatagccagtcctcgcctcctcggtaaacaaagaaagcagtgcacatatggaaacatatatgcaaatattaataaaaaggcttaatgggacccacagtccaaaccagacggaaaaatctccccttaagataaatatgatggggccgggcagtgatgccgcacgcctttaatcccagcactcgggaggcagaggcaggcggatcatcttgagaggtatctggagatacacgagaccctttctcataaaaaccagcaaacctgtgtgtttatacagagcagaagaatgcagtggtttcagctttcttgaaacacattgttgatgaaagtctgatgattagacttagcccttacatgagtgtctgtggactctcggcttaaacatggctcatctctcagcggtgtctctgaagcctgagacatggcgggcatgggagagcttctttatcttattaagcaaatacccccaaaacattgagtctgttggttttttatctctgcctcagaagtctgcagacacagaagctggtctgtgataatctgatactgtttatggtggctcacagttatcgagtgcaagagttgggtggccctggctcacctttgagtccacactgaccagtgatgggcaagtacactcagaacgtcccatgaggtccagacatgctagacagagtgctatcctcatggccattgctgtcttgaaatcagcagctgtgattggtcctacaagactctgactcctgcctttgtgtgggggagggaacatgtacagagacccagagcatgtggagctctaccctccctgaggacatattccccctgtggtctgagttgcccatgttcctataggtaaccccagttaagctcctggcgggagggagggtagggtgcaggggtgtgacagctcagtgggtaaatcatctgtacacacacacacacacacctcacatctctctcatgaattataaataaaagttggagttactgaattcttaaaaataataagctgggcatggtagcacacatggttagtctcagcactcgggaggtagaggcagatggatctctgtgagattaagcttagcctggtctacagagtgagttccaggctacatagtgagactctgctttaaaccaactctgggccatcatttcttgggtctgtcattagtgagtagatactcaggtctctgcagggagattgaacccaataggtgtgtgtaaagggacagccatgcaagctcacactgcttatgaaaagctgctctaaacaggccccgaatatcctttgcacttctcgttctgtctgggcctcagttttgttattaagctctcctgcctcgtgtgcagacgaagcgatttcgataaaggacaatgcttttgtctaccgtggagcatgagggtgaggctctgccaggcaccaggccctgcttgtgctcctgtgggccagccaagcaaagccgctgtcctcatggcagtagtgcacggctgcaggacgctgcctgggcggtgccatcagggagggggcagtactgggcacagtggcaggtctgagaccacggtgggagggctgaagcagagcagagtgtttggggcagggagaacggctgcttgcaggaatgtgggaaacccaaaggcagagtacagagatggctagggccagattccagctttatcctgaattgcttaactaatacaatttggtaagtgctgcatacttttagaacttgaaaattaacgtttctaatgattctaagccctctccctgctgctgtaggtacagctaggctgtgggatttctgtgggactgacgtgtaggtagtaaagttcagtgggaaagccctggccaagcatgctccagcatgctccagaccctggaccccagctcctgtgctgcagagggacgcacacaaccaggcgcatacatcggtacacatacacacagaggcgtgcacacatacacacaggtacacagacagggttacacagtggtacacatacaagtatgcacactcacacaggtgcacacacaagtatacatactcacacacagttacacagacaggtatacatacatgtgcaggtgcacacacagatttatacacacaggcatacacagacaggcacacatagtgatatacacacgagtgcatacacagagctatatatacacacacaggtacactcacataggtatacacacaaacaccggtggtcaggtttaatcacctctcagtaatatttaccatctcaagactctgtcaggcaactcacctagctgtgtccccatcctggctgctcaccgtgccttatctctgccatctcacatccagctcgtgggagcagactcagcccctcctctgccccagtccccacagtagtgctgtgaagcacactgctataattctgagttgctgagtgtgcctcaggtacgggcctgatgctactctgtgaagacttttttgtttttgttttttggggttttttttgtttttgttttgtttttgtttttgttaactcttgcttttcttttcaccagaccatcagacaaaaaattttagacttgctgaaccccttgacaggccatcttggggtccagctgatagctgcggttgccaccgtgtggaacagaaagcaggcacggcgccacagcaagaccaaggtaggatgaagacggagagggctggctacatgggctcagtgcatgcggtgcctgctgatccccacagactgtcctctaacctctgcacccacactcacaagataaaaaaatggaagaagaaagatagaggataaatgtgaggacaggaagcatcaaccttgggcctccacacccatgcacacactcacacccacgcacacactcacacagacatggaagtacctccatgcacaccacgatcacatcagacttccttctcgggggacagccaccgtggaaggctatgtgtgtgctgtcttgcttttaccttctcctgtcagccttcaaggaactctcttcttctgggcagatggtccccgtggcaaacacgtcccagcacacccttgtcgacctggtctgtgctctcagcaccctgcagacagactcagtgctgcagctggtgaaggaggtggtgaagaggccagcgcagatcaaaggggatgaggtaaggcgccctggggagggaaatataccctgggggatccgcaggcaggtgcgtggcaggtgcgtggcaggcctccttcctggtgcttcttccaggaagaagtgacctggtgggaaagagagaattctttgggttgtaaggaagccctgtcgctgtgtgttcagactttgggcactgctgtttcttagtgggagctacctgaggtcagcttgcctgtccctgatggctcacatcctgcctgatgctcaactcttagcaccttctagaaaaaggaaatggcacctgccttcaggagcaccacagctgtggaggtgcagaaagtaaacaaagccaggctcttgcaggggcgcagacctgtggaagttagcaggctccagggcagggggaggtgctgggtccagttccgatttggttttgatgaccagcgaggaaagtgagaggtcacagaggaggggggctgtgaggtcagctcaggggatcaggccagctgagcttgctctctgtgttaatggaagttagttagcctgacctccccacaaagaaatagagatcagcttccctgtggtctgacttcaaagggggtggccatatgtccccaaggcacacactagggagcccagcagtcctcagcccttgtgagaaagtcagggacggagctgggttggagaccaccaggaatgagtgtccattctgttggcgacctgagctttctctgcatgcgcttgctggagcttcagaaaccgtcctagtgacacagcctgaccatgggtgactcagaaaccatcctagtgacacagcctgaccatgggtgactcagaaaccatcctagtgacacagcctgaccatgggtgactcagaaaccatcctagtgacacagcctgaccatgggtgactcagaaaccatcctagtgacacagcctgaccatgggtgactcagaaaccatcctagtgacacagcctgaccatgggtgactcagaaaccatcctagtgacacagcctgaccatgggtgactcagaaaccatcctagtgacacagcgtgactgttggtgactcagaaaccattctagtgacacagcctgcccatgggtgactcagaaaccattctagtgacacagcctgaccatgggtgactcagaaactatcctagtgacacagcctgaccattggtgactcaggtttcctgtgtgtgagagagaggggctacaagagactgctgtgctgacggcctagctcttgcagcacgaagtcagcagttggccacagcgtgttaaaaacagtcagaagccaggcatagtggcgcacgcctttaatcccagcactcggaaggcagaggcaggcggatttctgagttcgaggccagcctggtctacaaagtgagttccaggacagccaggactgcacagagaaaccctgtctggaaaaaccaaacaaaaaacaacaacaaaaaaaaaaaaaaacagtcagaagacacaacttatccagaccatcagggaaggaagagatggattgcatggactgaagccaacagctttaaagtacagctgtcaatctgctctgcttggaaggaaacaaagtagtttgtctgggccaaatttgagtgaccatggtctgagaagacaaagtgaagttatcctgaggtcccactgtgaaaaggttccatggttgtatagttacaggacagagggaagtcatgaagccatgtatttacagattcaaaggagctagggcttgtctgctccagttcagatgtcatctgtatggaattgccagctgtggggccggagacttgagttcaaggctggtgggtcagatccagcggctgacttacttacctgcctgttataggagctaaagcgagctccaggtgacggcctccttctcagcctctgtccctccctctgaggtgagtctttagttctcaggggcaggagcatggagtggcaggattgaactagggaactcatgacaggtctggcaagattccacctcaccatctaagagtccttatcaagaccacctttagtcatgcacacgaactgtacacatatggactgcacacacatggactacacatatatgaactcagagtcacagtaaagagacttgagaggcgattagagaatcagccttgaggcacaaggtccaaggacacagacagctcccttccacatttgttggagctctgttggttgattgtcaaccttcacctgtcgctgtacctagaccttaaagtaggcgggccaggaagtgggactaggaaatagcccttcctgggggcccttgtcaggctagctctacttccttagatgccagggctgcgccctggagacagcacatgcacagtacaaccagtgggcctctttaggttgtgtttttcaagttactagaaagtccatagaaagctgtaacttcttatttagagggtgtgaaaagggaaccagattctatccatctgattgaagattggtatttctctggttattttagttgaacttctataaatagcttcctaagaggaaaagtttatttgggtgtttttttgtttttttttttcctcctgtaactccagctggtcaggacttaaggaactctgatctaggcagggcacgctcctccactaaggactagacccttgttttgccaagaggccattctgtgcgcttatgaagatccacattcttcctggtccgcaagttgggacctcacagatatggttgtccaggtatatgctagtgttgctagtgcgtgtttacacaagagtctttggctcaaacttatgtcacgtaaccacagttcctgtcagaagagacagacaactcgaggaagggaagacatatgtatctgctaatggcttctgaggctctgtccattggcagggccactcagcccatggtagcagcaggagcatgtatggagactgttcatgtcacagcagaccaggaagagaccaggtaggcctatccaggggccaggatgtgacctccaaaggtcttcccccagtgtctcacagacacccaaacagcacttcacttttgggaaccagtgtgtgtaacatgggcccgtgggaggcacttcagattcaaaccttagcagctgcagccctgttgagttttctgttgagttctttgatactctcccttcctacccacttgcagtgactggtgttgccttctttaccttcctaccagcctgcagtgactggtgttgccttctttcccttccttcccacctgcagtgactcatgttgccttccttttcagaagtctcccctggtggacattcctgtgttgcagttctgctatgctttcatccaaaggtaatgacgtctcctgcgttggcagggactgtgaggaattagctaagttcagagagcttaagtgtcatcactccctcccacgtgggcgtggcctcagtatctgtacttctctgtctctgaagagcgacatttttaaagtccacacgctgcacactgaaggctttgtgccagtgaagctttacctgaggccttttaagttttgaaaggttcaggtttatctgaacgtggctttaaaagacctgcaagtaggaagtgtcaaggcccctggagagaaaggagaagtggtttggttgacccagctggatctaagtctgggctgtagctgctgtacagggatcccaacgtgcacaaagcagggcctctgttgctgtactcctgtcacagcttgcagagggccatttgtgttgggctaagtgagggatggaggggcacgtgcacctcgggcagccatgcctcctaccctgcaatgccacagcctccccaaacagcaccaccatctggaggccttgtgctcgacacccatcagggttgctgggttcggggttcaggttggggctcacagtaaataaatgtgacaaccctcgaagtctccttggttcgcacagttaacatctcagctactcctcctcttcacagtgtgcagccacagacaggtaaactgaggactgccatcccagcagtcactgggctgattgatgttaaattcaaactagtgtcagccttctctcaggagcatcttttgcagtcttctgggctagtcatgccactctttgggatagccagtgctactgtgacaccagctgacctctgtggcttttagtggctctgagctgctcagcagcttcagggcagatttttatcgtccttctgctgcagaggaggagccaccaaggtggaacaagaggcaggaaggtaggcaccagggtgtggacctggggccctctgactgcatctgtgctttagcaaactgtactgcagtgcctggctgcacagccgagatgtcagcaccctcctcgctgccgtagaggcctgaccctctcgagagctgccctgggcaatggtcaaatgcgtgtttcacctcccttcacgctgcgtctttaccacccatgatgcatgctgtcctcagcgctgggcaagcatggccaagaatgaaagctgagcagctggccaaggctttcattttccagacagtgaaaggcggagtggccacatgtcagaagctgctccaggttccccacctgcaggtgcttgccccaggactgactctgagcttgcagagactgtaataaactaagccgggcagccatgaggccaggcagctgtgctgttctcccagctgcttccctgcatctgaaatgtgctcagatttggtcttgttttttaaacagactgtccataccagacctgcaggaggccttcccttccctcctgggcgtcctgaaggaggctgcgcagctgaacctggctccccctggatactttctgcttctcaggtatagattctccacatccacacagatacagtgttttctataggagggatacattttatctttatttctgtaacattttgaccagaagctgattgtctctcaacagcatgttgaatgactttgtgacaagaacacccaacctggaaagcaagaaggaccaaaaagacctgcaggtgtgtatatgagactgttggggaaggtccagtagtctgtcatcctgtagtctgtaagaatgccactgttgctaataacccttacccagaactgcatcttagctttgcctgggttctaagcctcttccactcaggaaggaagatcaagcagtcttgggcagggtctattgtgagctgggcattgatatctctaaagcacgaatctttctcctcccaggaagctttccttaaaactttctctttgccccagtataaaagcaaagcgtgttcataagaaaattcaaaaattcaaacagtaaaacttacccagatgtagtggcccatgcgtataatcccagcattgaggaccagaatactaaaaccagggtgctgaggcagggggattgctatgagttccaagccacatagtgaattctatggctacttagtaaggatccatctcaaaaacaaacaaacaaacaaacaaacaaacaaagtcatgatatacttcgggcatcactggtctgcagttacgaatattaagtctgtggctattctttttaaccaaagactcaattaaaaatagatgtacagtattccttgactacagagatgaccactcaaccatttatagtcatctgaatgtctactcagtggctggtactatacttgggtatccagggcttaagtgcagcccagagcatttagatcaaggctttttgggttttttgttttgttttggtttttggttttttttttcaaaggttttatttattttatatatatgatgagtacactgtagctgccttcagacacaccagaagagggcatcagaccccattacagatggttgtgagccaccatgtggttgctgggaattgactcaggacctctggaagagcagtcagtgctcttaactgctgagccatctctccagcctgaccaaggagcttttaaaggcaaaagttacttcctgttgtttccctctgcagctgcaggggaggtttgcagaagcaagcagttaaagagcagctaaggtaagttagctgggggcgtcttggcctctggtcctggaatagagttgggcagttttctacaggattctccatcaaggagatcaaattctagttaaacctgacatggcctgagcaagactacagatgaaagaagctctgccctgtcctgccctgtcacactcacatgtaagatggaggaacccctgccctgtcctgccctcatcctctccatctcccacctcccttaggattgtgtctaactctcttacaacctaattctggcttcatgacacatgtacacacgcatgcacattcatgcctacatatacacacatagttgcatacatacagatagaaagttcacattatttgtcttattttgctaacatgatgatttccagttgcctcaatcttcctgcaaaagaagattcatttatttttccttacagctacaatttttaccgcattttcctacctatctgttgatggacatctaatctggttctctttcctcctggccctgttttctgagaaatggtcttgctgtgtagctcaggttagctttaaactcagagtcttcctgcctcagtctcctcagggcttgggtcataggcctaggccgccagcccaggctggtctcactgtttctgtgcagctggggaccagccaggactcctgagctgtataccaagtcacttcaaaattcttactcttgctgagtttcccagaatagctttctgatcttcctgctttcgcctatagttgaggcttgagagatgtctcagtgattacgagcaccagctgctcttgcagaggacgagggcttggttcccagcacccacatggtgacccacaaccatctgtaactccagctccagaggatctggcgccctccaatggactccagtggcactgcatacatttggtgcacagacatacttgcagacaaagcaccctaaaataaaaataaataaatcgtaaagctcttattgcacttaaacaggcaacattttgttatagtattccagcaggcccgccatggaagcagcttttccagatgaaggaaaactaaggaaccagtgacctaacgggattctgagttgttctgtgtatggggacagagggcaaagcacattaacacaaactcccagaacctgttgtttcgtgtcaggctactcctcaatggagtttaagcagagaccagttagcacagccattcaaacgttccttgcctggaggttgcagggttttttgtttgtttgtttgtttgtttgtttgtttattatatgtaagtacactgtagctgtctttagacactccagaagagggcatcagatctcattacagatggttgtgagccaccatgtagttgctgggatttgaactctggacctctggaagagcagttgggtgctcttacccactgagccattcaccagcccccaccccaccccccacccccgttgcaggttttcttcttgctttctaggaaggcagggtagcagcctacaggttgggacagagctgccgtggagccctccaccagtagtgcttggctgtgacacctaccactgtctgggattcaaagaagacagtttggggagctgaagagatggctcagaggttaaagcactgactgctcttccagaggtcctgagctcagtccccagcaaccacatggtggctcacaaccatctgtaaagagatctgaggacctcttctggtgtgtctgaagagagccacagtgtggtcacttacataaaataaataaatctgaggaggaagaggagtctgggggaaaaagagagaggaggaggaagaggagaagaagatgatgataaagatgattcttgaatttatttacagttttgatcaaaacctggagagaaagaaatttttcttctgcccctgtcttccccaaatcaagctaccaggtttagaaaggacagaacaaaagccaggaatgtgtagatttacacacagaccccctaagtaaaaggcaggtttattcaggattagttacgggggtcgtcagggtaggaggtccatgaaatcaccacgatggtctgggtttgggggtctggtcgtgtgtcctgtgtcaagtggtcactttagaatctgaaaccaagtgtgtgctttgtccagtgttctgggccggcttctgtaagcctggcaacctggtgggactctctttgttctgtctcggagtcccacgagcactggcttcttcctggtggaggaggggtgtcttctttgtcccaaagacctcccgcctgacagtcaccttttgaaaacaggttttggttacttgggctctgttaaaattgccctggtttcaggtacatttctcagtctcaagggatttgggactttgtgacatccgaataccttttactgcgttgccacatggagtccatcagggcagctgaggtacttaaaagggatctaagctgcttgcttgttctagagggtcccagcagagctgagtgcagctggagccagcggtgaagctagtgaacatcgccacctactggagggattcgagcagagcactcgctcactgtcaatagagcgttaccatccccacagctcaccgttgcctaaaggcattactggtgagcccttctgggtttcagtctgtcccaatgacgaggagtaaagaggtggccctagagtttccctggagtccacctaaagtggcagcatcatagaacaaagttacactcctgtggaatatagacagggcatagttaaaatttactctaaaacaagcagccaatgcaaaacacagctcctgcttcaaagggaattagagtttattctgagccaaatatgagtggccatggcctgaggcacaggtttgggttgctgtgaccgatgtgttccgacaccagaagcaattggatggactttcattgtcatagaacaagaaagccatagagcaaggcacactcagtagtcagagggagcacggggagcaggtgaggcaagccaagctctatcacatggtgtctttagcggttatgggttttgcctgaccgttgaaaggatgttaagtcagccggaggtgtggggatggattccgatactgaactaaaggcagttcatagagcccccagctctgcgtctgcagcatacctagtctctgcagccctcagtggctaagaaagggtgctaccttttgtcggggatcatcagttcacaaagctccattccctcagaatacatttaagagtattgggtcagcggccaagaagacttgctcttcttgtggggaacccaagtttggttcccagcaaccacattgttataaaatacaattgacccatccagcaggtccagttattcgagggtctcgaggggaccttctcctaagaaccaaatggggggagggagagacggaaaccaagtgcaagaacgacaaggaagcagtctgagtagcatcaaggtctctctgtattcagcaaggttcaaggcttaaatgcacaagcaaaggaggaagtacttctcagcaggagggatggggcagcggaaatttttcttttggcaactacacgggggaagcaggaacttggtggtatcagggtacatcttgtggtcaggacatctggcgctgacttagggctggaacattctgtggttgttcttggaacggtgcgtcggtggcccgcttttgacccccttttcttctcgggggagaggcccaattagagatcaagacaatagagttgtcttaatatctcccaacatacaatgggatgagaggaagagggagagagagtgtgtgttttatcaagagaaggccagtttttatgtttttaaatatttttctttgatatttcataggctcatttgatggaactcatttcccaataccctctcctccccctcctgcacctactgacctggctcctccccacaggtactaacaagtcactgagctcaaagggggctgtgtgcctgaccacacgtggggcgtgggtgtggatagcctggctgtggttacccaactggggagactgtctgcctctgccgtgaccaacagagaaagctttgttgtaagcataaagttctagattctggttttctatatgtgcataaattttgttcttagaatacagacagtgccctcctttttttatagctagctataaattagatataaatcctttctcttaacacatgagtttacaggcctcccagtacggcttacagcttttataactgctcaggtcgtcagtgatggcacacctgtgtgctcttcatgccttttaagtgaatgtatatgtcctgctttaggctgggcacaagaagaagaccaaacaaaattacatttcttgagtttaaaaatattggaaagtataaccagcacttaattacaagcctctagaatccagtttatgtctatatttaacatatagtctttcgagtgacactttttctgaggaggtgtgaacacacatcgatttcccccagataggaacggatgactgagccgcaggcctcagttcctgagctgagtctcctagcacagggcagggcagggctttggaggcggaccacttttgctcctagcatgataaaccacagaaagccagaactagaaaagacggctttttaatagcagatggaaatgttaggaggttgctcccagcactgtggaataactggtttttacttggtttttattcggttggttttttgcgctgcagtgtggtggaaggggttgaatccagggcctcctgcatgggaggggaaagcactcctggcttcagcgactgttagcaaataacctgcgtgttctccagcttccttcaggatgactgcttacttagagtggtgttcctggagtttcaggcagaagccattgctcctgcatgtgtgcttgcctctgtgtgtgtgtgtgtttgtgcgcatgtgcgagaacatggggtcctggctggtggcactgttggggaagaatatggaaccattaagagtgggagtctctggagggagtagatcactgatggagccttaaggctttatagccagcccccacttcctgtatgctctctgcttcctggggtaaatacagtatatctagctggcccccactgagaaagaattatcacttcaaaatgtaagccagaattaccaacacccagctccaccccagccccaccccttttcaccccctgccttacattgttttcagatatttggtcatagcaacagaaaggaaaaccactcgaaggtccagcaagctaggctcaactactggtccactgctccagtgtccgcaggtacctccccagagccctaacaaacactcaaggtttacacagagcaataattgaggggtaggcaggagatgctcatagcaggcctagcgaaggtgtggtctgggcttcttgtcataaagatgtttatccactggcaccttgaggaaaaagagagtctcatggtcagccagagagagagcaagatggagacatgcggtggccagtgttctcagtgtcgaagcatgatggaggggagagtgggtgactagtgctctctatccactttgtcaccgtgcacagcttgttacttacaattgtaccttagatcccgggcgggcgagcaccagtcccaggaggttgatgtggtttttgtctcgggggcggggcactgttgggaggtgctgctgctgttgttttggttgtttggaacaggagtctccctgagtagccctaaccctaaccctaaccctaaccctaaccctaaccctaaccctaaccctaaccctaaccctaaccctaaccctaaccctaaccctaaccctaaccctaaccctaaccctaaccctaccgtaaccctaaccctaaccctaaccctaaccctaaccctaaccctaaccctaaccgtaaccctaaccctaaccnnnnnnnnnnnnnnnnnnnngtctatggtttaattggtgttaagtgtagtggatagtgggctaagtggtttagtttctattgtttgtgtttgtgtggttttttgttagtttttgatttttttgtgcgtggaggggtttggtgggttgtttgtgtgggatatcgtttcttttctttggcttcttgcttattgtgttggtggtttggtttttgtcccgtgctcttgccctgcttttggttcgcttgttacgttattctgtctctttgctagcgccagttctgtggtgtgctgtgttgttcggtgtgtcggttgcggggtgggtggggtgtgtgtttgttgttgtgttgttgtggtgtgttgctggtttgttgtggtttgcgcctttgccgttgccgttgcccgtgacccttcgccttcccttacccttacccttaccctaaccctaaccctaaccctaaccctaacctaaccctaaccctaaccctaaccctaaccctaaccctaccgtaaccctaccctaaccctaaccctaaccctaaccctaaccctaaccctaaccgtaacctaaccctaaccctaaccctaaccctaaccctaaccctaccgtaaccctaaccctaaccctaaccctaaccctaaccctaaccctgagactcattctctgggcagtcctcgcagttcagcctcctgagtgctgagatcacaggcggagggagccaccatgcccaacccaggcgattctgtctgtgcctctttctcttcctttctctctgtggagccttggctgcccaggctttggactgagaggtttcggtgtaaaagccagggtgatcaccggctttgttgttattgttttgtttttcaaaacagggtttctctgtgtagtcctggtatcctggaacttgctctgtagaccaggctggcctcaaactcagagatccccctgcctctgcctcctggtgtgctgggattaaaagtatgtgccaccacgtcctggttcacagctctcatttaaagggaataagaaagagttcattctggagccatttcaagagaccccggcctggccacacagatttaggtaccccaaattctgtgttctaatgtgcagtagtttcagagtttttagttttacagaacagagtcataaatcaaggcttagtaaggcgggcgtgaagaaatggagggagctatgtttataggcctagatgctgtctggtgacatgcctaactcttggtttagtggacgctagtatctaagtgttagttcagatacagagttgacaaggggtggctgttccagaannnnnnnnnnnnnnnnnnnncccctcctcctcctcctcttcttcttcttcttcctctctctctctctctctctctctctctctctctctctctctctctctctctcctctcagctctgctctgctctgctctgctctgctctgctctgctctgctctgctctccctccagctctttattcatccaaagcctctccccttcctgattaaaacaaaaacaaggcttatccccatatttgcatacagaaagcaggtctagtgggctgtagaaaggacgccagcacctgctgggacagcagtgaacaactgagactacagcaaagccccagcacagccggttggtagaacgaatatgcagggaagtaattaccctctaaacctacaaaatcatcccaagctctctacagcactgaaatttcaaccaccctgtcagtctctgcaaacacagcaagtccttccagcagttttgttcaccgtcagacaaggcttcttttcaggaattctcactcacaggggttctaggaactcccgttcttaggtcactttggctggccctaagtaagtgcacacagttagcgtatgctaacttgtactactgacatccttatctgcaatatctgatctgtagcataacctgcattgcctcttggggcaatcttggcttcatcagtggtgctgagagttcctgtcagcaggaaaggcaagcagttgtctccagctgagcccggtgcctccccctctccctgcctgtttctttcttggtggcagtggggtctcctgtgcctctgatgatgtctgagctttagtagagctgctgttctactcattcatatactccctgacagccagagagatgctgggtaagacacaaagctggcaataaatgactgttgagggaaggaaggacaaccctgtccactgtcccctgtggacagccactcttccctggcaacagtggccaaagtgctgggagcccactcaggctgcttatgtgaactaaaatctttttttaattaatttatttattactatacataagtacactgtagctgacttcggacacaccagaagagggcgtcagatctcattacggatggttgtgagccaccatcatcgtggttgctgggatttgaactcaggacctttggaagagcagtcagtgcccttacccgctgagccatctcaccagccctgaaatcatcttctttgagacaaggtgtggtgtattccagcctggccgtgaactctgtgtagctgaggatgactttgaacgtctatcctcctgcctccacctaactagagctaggattgcaggtgtgccaccacccctggctttatgcagtactggggatcaaaccagggggcttgatgaactactctgtcaactgagttatgcctacagttcctgcccagacctcctgtgtgtgtgtgtgtgtgtgtgtgtgtgtgtgtgtgtgtgtgtgtggtgtattcacatgtatcgaccatgtacacacatgcaaaggccggaggaggacactgggtgccttcctctgtcagtctgttgccttatctcattaagatggcctctcactgaacctggagctagactggcctccagcaaggcccaacaatcctccatcctcccgtccacccccaacaccgctgaggtcacagacatgcttttgaccatgcctagccctctccatgggttctggagatttgaacccagcgactcctgtttgcatgattgttcttgcccagaaagaacctggccagactcttctgatggtgctcctaattgtaaatggctggtcactcacccagtccaagcctacattatttaattttgtttcttcttatattatttaaaggtgtatttgttatgcaattagcaaaactacagcaatttattttaacgatatctttgtttaagatacagtctctctgtatagccctggctgaacgctccctctccctgcctaccaagtgttggcgtttcagtcatgcacaacagcacgcagcactgtttataaagatcttgactggctctactgtgagtctagaataaggccatgcttcatcccataaaagagagtaagtagtaagtgttctggtgagctcagcagaggccaccggttctgcagacagagacaggctgaggggaacaagactaaaggataaatctgccccccaggctctgcttctcgggagcggagggcaggcaggcaggcagcagcaggatagtccatgttgtcttgcttctatgtgaggatcaaggcagaaggagcttcgccaccctgccagtgtacacggagtcagcacgagtgactcggccgactgttggtgtggcctggcagtccacgaaactttgtaaagtctcaagtccagcagcttagtaacagtggtgtcctgtagtgtttagttcataccagcatgaaccacaatccaggagaaccagaaagccggcctttcccatcagtcctgcagactttacccgtcggctggtagagagcagagccacaataccacgtgctgagagaagatcctggtcgttgtaagcatgcagtacccacaggagtccaaagccagccagggtaggagacagctgcagagtgtgatgctgatgtttatattggaatatttgtaggtagagaacctgttactaaaatctgtcaccccagctgcttttcgcctctcagcgtggctcattgaaagtctactggtgccacggtgactcacgcggtggcccgtgccctgtacctgtcagacagtggtatgcaccggctcttttcttctnnnnnnnnnnnnnnnnnnnnnnnnnnnnnnnnnnnnnnnnnnnnnnnnnnnnnnnnnnnnnnnnnnnnnnnnnnnnnnnnnnnnnnnnnnnnnnnnnnnnnnnnnnnnnnnnnnnnaacaaacaagctggctcagcagaaatctggaggtgaaagcccaacctcaggtctctctggaagagtcagatgccgaggacgacgtgcacagtaagtggaggaggggtgggaagaaacgcctgcttcagccaaggctctgaggacgctgtggacaaccgtgcttctattccagtgtgctctaatacacaagtgtaacagagaaaacagtgacccaagggaggttgttggagttcagaaaatcctgtttaaaaaaaaaaaaaccaccagtaagcacatactaaacattaacagagcagccctttcccagaactttctcaaaacatgccagttgacacagttgcctggcacgtgctatagatagattatacctgggtaagcaggagagcagagcagaaggtgataacctgatttagggcacactgaccaggctgggttccatagccacgataggatatccaacatcaataaacacgtcctataaatgggatgtaaatgtttgtcacgggaggcacagaatcccctccaagaacaatccagggaacaaagtgccccttgagggaaagggccctctgccttttctcctggagcctccccatccccaaagctttgttcacgccattcttttgaccatgttcagtattcattcagttgtcctagctcacacaaagggaagaaggctgctaggcagtggtggcgcacacctttaagcccagcactcgggaggtagaggcaggcagatttctgagttcgaggccagcctggtctacagggtgagttccaggacagccagggttacacagagaaaccctgcctcgaaaaaccaaaaagaaaaaaaagggaagaaggctgagtccctgtggggaagggagtggtgttagtgtgcgcctgtctgtgattacccatcagcacatcgccgtttttcagtctcagttatcctcggaagagcatcaggaggcactggaaagtggacacacacttctcagcccgtggacaagcacactgccttttagcctgttcctgggcccaggcgactgcccaccccacctcccatgcttgtaactgactgactgcacctgttcctgaggtttattcttcatggtnnnnnnnnnnnnnnnnnnnnnnnnnnnnnnnnnnnnnnnnnnnnnnnnnnnnnnnnnnnnnnnnnnnnnnnnnnnnnnnnnnnnnnnnnnnnnnnnnnnnnnnnnnnnnnnnnnnnnnnnnnnnnnnnnnnnnnnnnnnnnnnnnnnnnnnnnnnnnnnnnnnnnnnnnnnnnnnnnnnnnnnnnnnnnnnnnnnnnnnnnnnnnnnnnnnnnnnnnnnnnnnnnnnnnnnnnnnnnnnnnnnnnnnnnnnnnnnnnnnnnnnnnnnnnnnnnnnnnnnnnnnnnnnnnnnnnnnnnnnnnnnnnnnnnnnnnnnnnnnnnnnnnnnnnnnnnnnnnnnnnnnnnnnnnnnnnnnnnnnnnnnnnnnnnnnnnnnnnnnnnnnnnnnnnnnnnnnnnnnnnnnnnnnnnnnnnnnnnnnnnnnnnnnnnnnnnnnnnnnnnnnnnnnnnnnnnnnnnnnnnnnnnnnnnnnnnnnnnnnnnnnnnnnnnnnnnnnnnnnnnnnnnnnnnnnnnnnnnnnnnnnnnnnnnnnnnnnnnnnnnnnnnnnnnnnnnnnnnnnnnnnnnnnnnnnnnnnnnnnnnnnnnnnnnnnnnnnnnnnnnnnnnnnnnnnnnnnnnnnnnnnnnnnnnnnnnnnnnnnnnnnnnnnnnnnnnnnnnnnnnnnnnnnnnnnnnnnnnnnnnnnnnnnnnnnnnnnnnnnnnnnnnnnnnnnnnnnnnnnnnnnnnnnnnnnnnnnnnnnnnnnnnnnnnnnnnnnnnnnnnnnnnnnnnnnnnnnnnnnnnnnnnnnnnnnnnnnnnnnnnnnnnnnnnnnnnnnnnnnnnnnnnnnnnnnnnnnnnnnnnnnnnnnnnnnnnnnnnnnnnnnnnnnnnnnnnnnnnnnnnnnnnnnnnnnnnnnnnnnnnnnnnnnnnnnnnnnnnnnnnnnnnnnnnnnnnnnnnnnnnnnnnnnnnnnnnnnnnnnnnnnnnnnnnnnnnnnnnnnnnnnnnnnnnnnnnnnnnnnnnnnnnnnnnnnnnnnnnnnnnnnnnnnnnnnnnnnnnnnnnnnnnnnnnnnnnnnnnnnnnnnnnnnnnnnnnnnnnnnnnnnnnnnnnnnnnnnnnnnnnnnnnnnnnnnnnnnnnnnnnnnnnnnnnnnnnnnnnnnnnnnnnnnnnnnnnnnnnnnnnnnnnnnnnnnnnnnnnnnnnnnnnnnnnnnnnnnnnnnnnnnnnnnnnnnnnnnnnnnnnnnnnnnnnnnnnnnnnnnnnnnnnnnnnnnnnnnnnnnnnnnnnnnnnnnnnnnnnnnnnnnnnnnnnnnnnnnnnnnnnnnnnnnnnnnnnnnnnnnnnnnnnnnnnnnnnnnnnnnnnnnnnnnnnnnnnnnnnnnnnnnnnnnnnnnnnnnnnnnnnnnnnnnnnnnnnnnnnnnnnnnnnnnnnnnnnnnnnnnnnnnnnnnnnnnnnnnnnnnnnnnnnnnnnnnnnnnnnnnnnnnnnnnnnnnnnnnnnnnnnnnnnnnnnnnnnnnnnnnnnnnnnnnnnnnnnnnnnnnnnnnnnnnnnnnnnnnnnnnnnnnnnnnnnnnnnnnnnnnnnnnnnnnnnnnnnnnnnnnnnnnnnnnnnnnnnnnnnnnnnnnnnnnnnnnnnnnnnnnnnnnnnnnnnnnnnnnnnnnnnnnnnnnnnnnnnnnnnnnnnnnnnnnnnnnnnnnnnnnnnnnnnnnnnnnnnnnnnnnnnnnnnnaaaattgccagaaaacataatatacaagaaaaggatagtaagacaaacaaaaatgcccaaagaaagcctccaccaagacagagacctacaaaaatactaccgagtacattttgtattgaccacatgctgcggggcctggggagactccactggagaaaacaaaccttcacatgggagtgtggatcagctggaaagcctgtgtttgggtgggcagggaggctgtgttcagttcctcctcggtgctgagaccccatcttgcttgggcctgtgctgcccgtctctgatgtgcgtggttcctgttgtctctgaagatgtcgatgaagacgccaccatttaggatggagtgttccagagtcactgctcagctgtgggtcccctgagtagttcccttctaccgcaagaagcagcttccctgaggatggctaagcaagacactgatctgagtcccaacccgtgtggtcctagggacccagctagacagactgattcattctggcaatctccagaatgaacctagatggcagggcagagtggtgtaggggtgtgttggggtgtgggaagaattcccagcagtcagccaggcatgcacacacttttgtttcaaaggagtggagccatatagcatgccctgccacccaaacaggaattctcttcccggaatgaggagggacagggagctgggcggtgcccaggggcagcctcacgtggttcttcagaagtcgatgcctgctttgttttggagactagtattctccctgggacctgagcttgctgattggcctggttggctggccactgagcttctgagatgctctatctctctccccagaactgagggtcacatgacccacacctactcctctccccccccagcactgagagtcacatgacccacacctacctctccccccccagcactgagggtcatgtgacccacacttacctnnnnnnnnnnnnnnnnnnnnnnnnnnnnnnnnnnnnnnnnnnnnnnnnnnnnnnnnnnnnnnnnnnnnnnnnnnnnnnnnnnnnnnnnnnnnnnnnnnnnnnnnnnnnnnnnnnnnnnnnnnnnnnnnnnnnnnnnnnnnnnnnnnnnnnnnnnnnnnnnnnnnnnnnnnnnnnnnnnnnnnnnnnnnnnnnnnnnnnnnnnnnnnnnnnnnnnnnnnnnnnnnnnnnnnnnnnnnnnnnnnnnnnnnnnnnnnnnnnnnnnnnnnnnnnnnnnnnnnnnnnnnnnnnnnnnnnnnnnnnnnnnnnnnnnnnnnnnnnnnnnnnnnnnnnnnnnnnnnnnnnnnnnnnnnnnnnnnnnnnnnnnnnnnnnnnnnnnnnnnnnnnnnnnnnnnnnnnnnnnnttgcgctaagtgttgttgtctgtctgttgctcagtaattaaacccaacctgaggacagtcctgtggtaaggcagcacctggctcctttcagttcctggcaggcatagactcgggaagctggccgtagttttcgagcttctcaggaagcctgggttagcaaacgtcatagcagcactcagcagtaataaatggccgtgatggctggagaaagagtgggcatttccctccattgatgtgcgtgtgttgtgcatgtgcaggttcttaagggcaaccttgtgtttggactccggtgccattcagccgaggaggcttaggctgagacgcctgtattagaaatccagagtcttttgtggttggttggttggtttgttttgtgttgtgggtgttttgtctgtatgtgtctatgtaccacgtgtatgtcaagtgcccatagaagccagaggtggtattggatctcctagaactgtagtcacggctggttgtgagctgccatgtgggtactaggaattgaacctgggtactctggagagccaccagtgctaaccacagagccatctcttcagccccaattcatagtccaggagtactggtcgtgttttctctgccagttcaagaattagaaggcgggaaaatgtgaagcgcagcaggttacagcagacagctcttaataagcactggagctagggccagcagccgcaagaccagcagccgcaggagcagcagtcgaaggaaggtgtttgctggggctgagtgggggtggggagccatgcccgcagcagacacacagggagaggagggactcaaaagccagtctcatctctggggctggggcttctaaagctctgaagagttgccctcccctactgagggttggtcagtgtgaagacagacagggtggctgattggtccacaactgctgactgctgtgtgatctagccttgatcctgctggtgggaaacaaacgctaccagacttgtgttttaatcagggggttgaggaagaagctggccctcttgagggcctcgttatgacctacccatgggccctctggctagcgcctagtctctccttgatgaaactgctcagaaacaagatggaggacagagactgaagatgagcgggctgggtatatagcatggcacgtaggatcccacgctaccccagtagtcagggcagccatgcagtaaggctccaacttcagaaagcatcgctctaactgtcatgagtaagggcactttgcacaagagcagaagccggaagtcctgtcaaaggattgcagagtggttcacacaagaaacaatactcttggctgtggtctgaaaatgcagccaaggaaggttgggatttttggctcaacagtttactgacttggagcagaatggaggagcagagccagcacgcacatggtgaatctggggtgtcaggaagagaggaatagccgtcaaggacgggaaccaagtcaccagctgagaggacaaccagcacagcacaggaggagtctggggtggaatttccaaaggctaggttggtgagagtctggaagcccatctgccaggctcaggatgagagggagcgttagatgggtcgacagtggagagaggtgagggctggtgctcagaactcctcaacgctctggtcccctgatctggagcagtcagctggaaggccactgggatgctgccagctcatcgctggcttctcttttgcttccagcttctttcctgttctctcattttgtgttgggcctgggggagggttgttgcttttaagcagagtctcatgatccagcactgatcatgatccagcacacttctccttggagtcatgtacacaggcgcgagtccagatgtgaactctctgcttcacactcctgtgttttctgtcttgtgtgagtctaaacatgtgtctgccagaagcctgacttgtgactccgtccctgtgtctgtctgactgctgtgtgtctgtttagcaaaggactttgatctatatttattgaacagcacataaagaatcacatgggaaaggaatgggagaaatctttaaccagttttacagggattaagtcaccagccgcaaccaaccctaagtgacccagataaccagcactgttgctcgtcagctgatacccacaagtgggtatgcattctaaaagattgctttcaacttctgcatctgctgctttcagtaaattggtgttggaatttcactggccacgtacgtgcgtggtcattgcagagaggacaaaccataaacagacctaagcttgctggacttagccagatttccccttcctgggtggggtcttctgagggagagaggagcaggcaagaggacatttgccagatggatgagaggcaggatgctgtgtggagatggagaagggtgtcctgcaggagctcagcatgaaggcttgtcagtgctgcagcaaggatgtagaccgggagcagagcagaagagtgtgggaagacggactctgagctcagaccaaaatgccagctgctcacccgaaaggacctggaggcagtgagctggcgctggtgtgtttgatccaaatacccacattctttgtcctagttaggtttcatgacttagcaaagcgagagtcatctgggaaatgtctccgtcagatagactgtaggtaggcaagattacaggccattttcttgataagtgatttatacaggagggccctgaccaatgggggagagtggtcttccattctataggaaagcagactgagcaagccatgaggagcaagccagtcagcaggagcactcctccacggcctctgcattggctcctgccccgacttccccaggaggttggtgttctagacagtgtttctctgtgcagccctggatgatgtaagagtgtttccctccccaggttgtgtgtgatcatgttctttatcacagcagtaaatagaaacctaactaactccgtggttgggattggataccagagcagatactgaaactactgactgcagtcagagtgaaagtgcttagggaaggaggcagtcactcccctcagggctaaacagactcttctttctgtcagcaggtgctgctgaagcctccaccatggtatctgcttctgccccctccgtttacagtgtgcaagcgctctctctcttggcagaggtaaagattcacctgacctgtggttccttgtggaaatgcttactgtcttgaatcatttcgaagttgtgtattcattctgggtgccacgggctgccccttctgcctgagttctgaagtctagaccttgtgtcagccagctttctgttgctgcaacaaaatacctgagaaactcattttacaggaaggctcagggtgttagaggcttcagcccagttggctggctatattgcttagcctcaaggtggggagcatatggaggcacacagagcttgccctgtggtattcaggaggcaagggcacactgccagtgagcttcctccaccaggctccattagtacggctatgggctccaccatgtaggacatgttgttccagatcagagtagaacagcattggcttgcagcatggcacttttgattgacacttcaggagtttcgtttctttcctttcctttcctcttctcttctcttctcttctcttttctttttgggggtggggtggggggaggtggttcaagacagggtctctctgtatagccctggcttttgtaactcactctctagaccaggctggcttcaaactcatatagatccacagcctctgtttcccaaatgctgggattaaaggcatgtgccaccattgcccggtatctcttgttttctccttttttctttttgaaaatatatcattgatttgtttgtttgtttttatattcattatatatatcttgcctgcctgcatgtatgtctgtattagagtattggatcccctggaactagaattacagttataaccttccatgtggttgctgggaattgaaactggggcctctggaagagcagccagtgctcctaaccactgagccacctttccagccccgtgtcttgttttcataaaggaattctgcctcatttgttttaggttctggcttctctcctggacatggtttaccgcagcgacgagaaagagaaagctgtaccactaatctcccgcttgctatactacgtgtttccttacctgcgcaatcacaggtgacaggcgccatcatcacacccacatgcagaaatgtgtcctttgagaagttccccttgaccccaccccttctcttcccttagtgcgtacaatgctcccagcttccgagccggcgcccagctgctgagctccctgagtggctatgcctacaccaagcgggcgtggaagaaggaagtgctggagctgttcttggaccccgctttctttcagatggatacgtcttgcgtccagtaagaaattctgttctctttaatcccaggtctcagggagcagaggcaggcaggtctctgagttccaggacagcctggtctatagagttcgttctaggaccgccagagctatacagaaaaaccatgttttgagaaacaaaacaaacaaaacaggaaagaaagccccatgtgctcagtctcgcactgttggtgcctgacccttggaccgcggtgtcacctcagccccttgcatgtccctgtcatggtgctcacgttagtctgtgtttgctgaaaagacattatgtccttcaaaatacagaggtaaccttttatcaaaagaggcactgcactggattgagagagcctgctgctggcaaagagtgagatggagggttcaggagcctttcatcttcctcatggaagacttggcccctgttgagatcagagcccagattggctctggcaatgtctgcctggctgcctggctcatgcactccatgacagtagtgggcgtgggacgtggagaccccagggagacaggacactgagcaagccattcctgtgcctttttctcagagagcaggaagccagctcagggccacctgtagcccatgcttcctggggttcatgtatatgcatgctttgggtgagggtgagtgtgtgtgtgtttgtgtgcaagcaataatgaatagcctgcagaggaaaactctcagctacacctgggaggacatgagaacacattgtaagaacaattctgtgttttgagaaaactgaggtcatgagactcttgtgttgttttcttggaggagtctcacaagcactcagcattcccattccatgttctgacaaatgtggctgacaaattctggagagcagatttctttttttcaattttttatagattcattttgtgtggggggtatatatgcatggatgggggttgaggtatacggtggcggtgttcatgctccagtgtacgcatgtgcggagccagaggtggatgtctgatgtcctgctctgtcatcctccattgagagacagggtctcactgatcgtgcaaggctagcagccagcacgcccagggtctccatctccttatccacagggctggggttgcaggcaagagccagcatccaggcctggcttccacccagcactgtggaccgagctcagggcctccctccccaggctcacacagtgagctcttcccacccagccatctctcagcccgaaaagcaggtttaatagctctgggaggcatgttattttctcgatgcttttaatcaagctgctcagttgcatatttaactaattgtgccttttcgtgcatccagctggaagtccgtcattgaccatctcctgactcacgagaaaaccatgtttaaggatttaatgagtaagtttcaagttattgtcacacctgtagtaccctcatgctcagtttctaccacgtccaaccctttctgagactgggtctctccgtgtggccctggctgttcaggaaccttgaactcacagagctctgtgtgaccgcctccccagtgctggggctgaaggtgtgcacaccacagcccgccatgtcagacttctgaggtgctgagtgaagagccgagggtgtagctttcctaaacagtctctcagtccagtctgtcggcaggcctggcctgccccgtgtgtcacagcttccggtagatgctgctcaaagcctttaggccacagccggccgccttatgctgaaggtcttgagtctgctatagtttattatgcgtgcctctagatttcaggcagtgtctcactctggcctccaaatgtcgatgttagagtcagcaactggtaactcgatgcccagcttagatggccgtttccacaccttctgctctttcctgactccctgatgctgtttgtcattaatgaaatgagtgggtggttgttgttgtttgtatgtgcaaattggatttggtggaattgtcattcatttgttttggcattttactgttgaggaaaggtctccctctttggcccagagtgcctagaactcattatatagccccggctggctcaaactgttaacaatcctgctagcatagcttctcaagtgataagattatagacctgagccaccattcctggctgagaaggatttctttttttttttttttctcttttttttgagagataacaatctttctcttttatttaatatttatttattcatttattatttgtaagtacactgtagctgtcttcagacactccagaagagggcatcagatctcattatgaatggttgtgagccaccatgtggttgctgggaattgactcaggacctctgggaagagcagtcagtgctcttaacccgctgagccatctcacttttttttttttttctggaactcactttgtagaccaggctggcctcaaactcaaaaatctgtctacctctgcctcccaagtgctgggattaaaggcgtgtgccaccacgcccgactgagagggatgtttcttaaagagtgtgcagggttgacttacactcattcttaaaggggggtcctgactttagggggcatgtcacaaattggatcccaccattcttccctgctgtgctcccaccactgtcctgctgtgcccccaccactctcccccgtcccccgctgtgctcccaccactctccctgctgtgcccctaccactctccctgcttgctcccaccactcttcctgctgtgctcccaccactctccctgctgtgccccaccactctccctgctgtgcccccaccactctccctgctgtgctcccccactctccactgctgtgcccccaccactgtcctgctgtgcccccaccatctcccccgccccccgctgtgctcccaccactctccctgctgtgcccctccactctcactgctgtgctcccaccactctccctgctgtgctcccaccatgtcctgctgtgcccccaccactctcccccgccccccgctgtgctcccacactctcccctgctgtgcccccaccactctccctgctgtgctcccactctcctgctggtgcttccaaccacttgtccctggcttgtgcctccccaccacctcttccactggctggtgcttcccaaccatctgtccctgctgtggctccaccaactcctccctgcttgtgccccccacacacttgttccctgcttgtgcttccccccacctccccccaacaacccaccccgtgcttccctcaacaagctgactgctgtgtttattccagacatgcagagcagttccttaaaactcttctccagctttgagcagaaggccatgctgctgaagcgccaggcttttgccgtcttcagtggcgagcttgaccagtaccacctctaccttcccctgatacaaggtaagcgcccatctcgggctgtcctgcgcctgccacgggagacctaacgctggggattttatgaacaaacatgtcttggctcacagctctggggcccacaggcttgcatgtgaccaggggcatctaacacaaaagggaccaaacttgtcctgttatactggaaccaaacccactcatgagggagggcctgaacacctttaagtgtgtgtgtggggggtgcctttcagtgtggcaattccttctccttcctccctgtctcccatgacacgaggcccagaggtgaggcccagagggctaaggagttgtaagtgatacagaagctgggctttccgtaggccagaaaccttctcactgcaggttcctgtttatgaaacacaacaactcctgtgttgagtgtgtaaggcaggggtagatatagtgagtgtgtaaggcaggggtagatatagtgagtgtgtaaggcaggggtagatatagtgagtgtgtaaggcaggggtagatatagtgagtgtgtaaggcaggggtagatatagtgagtgtgtgtacacagacctgaactattcagtaaacaataacccaattatactgccccccaaaaacttttattttattttatttattggcaggttttttctgtgtagccctagctacttggaactcactctgtagaccaggctggcctcgaactcacaaaaatctgcctgtctctgcctcccaagtgctggtactaaaggcatccaccaccatgccagctcacagaattaaaatgaataaaaatgaatgtttttaaaaaggaatagaaatgagagatgggagatgctgagggaggagcctctttaagatgatctctagagccgggcatggtggcgcacgcctttaatcccagcacttgggaggcagaggcaggtgaatttctgagttcgaggccagcctggtctacagagtgagttccaggacagccagggctacacagagaaaccctgtctcaaaaaaccaaaaaacaacaacaacaacaacaacaacaacaagatgatctctagaatgcaggaagaacctggcttctagttttgtttgttttaacagcctggggacgccgatggggagtttcactttgcatggtttagtttaacccggtgtatatgaccaggaggagccatgctctagttagggtctaagtcagagtttgctgtctgaagcacacggcactccttaaccctgagccgccgccatcataacgtcctaacggggcaggcccgcgctggcatcatcgggcagcactgagcacaggtggctcagagcgctgctggtgacaacaatggggacatgggatgtgggtggtgacagcaatggggacatgggatgtgggtggtgagggagcagcggtaccatcactgctgcgtgaggatgagatgaagtccgtggccgcagactgcggtcagtgtggacagttactgccgtcgggaggataggtggaagccagccgcagtggaaggctgaggcaggctcacttgttggaggctaacctgggctacatagcaagatcctgttgggtgtttgtcttagtcggggtttctttttctttcttttttttttttttagatttattatttattatgtgtaagtacactgtagctgtcttcagacacccagaagagggcgtcagatctcattaccggtggttgtgagccaccatgtgttgctgggatttgaacttcgtactttcggaagagcagtcaggtgctcttacccactgagccatctcaccagcccttagtcagggtttcgattcctgcacaaacatcatgacccagaatcaggttggagaggaaaggatttattcagcttatacttccacattgctgtttatcaacaaaggaagtcaggactggaactcaagcaggtcaggaagcaggagctgatgcagaggacatggagggatgttctttactggcttgcttcccctggcttgctcagcttgctctcttatagaaccaagaccaccagcccagggatggcaccacccacaacgggcccttcccccttgatcactaattgagaaaatgccccacagctggatctcatggaggaatttcctctagggaggctcctttctctgtgataactccagcctgtgtcaagttgacacacaaaaccagtacagtgtttatggcacaaacacatacccttcgcttctccctgtttcccaagagtttcaggctggcctcaaactctctggataacaggcatgtgctactatgtccattttatgtggtgctaaaagaagaagccatacgtgattccatgcatactaggccagcactgggcctgctaagctgcaccctccacccagcactgggcctgctaaactgcaccctccacccagcactgggcctgctaagctgcaccctccacccagcactgggcctgctaaactgcaccctccaccctcccctccttttgttctctctttttttgttttaagacaaggagtggaggccactcgatagccctggctagcatataactcactgtgtggaacagactggccctgcacgtgtaggaatcctgtgtgtctacctgggattacaggtgtggtcccaagtgtgtaggtagctaggaatcatctctgcactaggttgtcatcagcatgtcacactaattacggttttatttttctttcttggctaaccagaaccccaaactgcatatttgtgtgacttctctaaaatcttctttccctagagcgcctgacagacaacctcagagtcggacagacgtccatagttgctggtcagatgtttctttttttcagagttctgctgctaagaatctctccccagcacctgacctcgctgtggcccatcatggtgtctgaattggtgagtgcacatggttcagttttaggtaaaatttgcactttttaaaatgccttttcttgggctggagagatggcttagaggttaagaggtctgactgctcttccagaggtcctgagttcaattcccagcaacctcatggtggctcacaaccatctgtaatgggaccggatgccctctgctggtgtgccttaagacagctatagtgtactactcatatacataaaataaattaataaatattttaaaaatgccttttcttttcttttctttttttttgagggggggatggtttttgggttttcgaggcagggtttctctgtgtagccctacctgttctggaacttgtctgtagaccaggctgaccacaggcgcaccgagatccgcctgcctccgcctccagaaccctgaggtgccctacctatccctaagcacgctttgatattattttcttactttccttgtgtgtgtttgtggtgctggtgatcaatcccggagctgcttgctaggctctgcgtaggctccagtctcccatccgctaggggtttggtttggtttcatatttggagatagggttctccaaagctagcctcaaactcagagatccacctgcctctgcctcctgagcgctggggttaaaggagtgtacaactactgcctagcctgctggttttacagatagacaaatttaggtaaacgcgatctctctcaaagagtaacctggatacacattttcttcctaagatccagacattcatacaacttgaggaagatctgaaagaggaagatgaatcaaggtaagctatgttactaagctctcagtgcatgctggtaggtgatgagttagatgcggcggtggggtgtgagctaccacaccacctgctgtcccctgggagtccttgtggtgggaccagccagtgttaagatgtaggtgttggtctcacgtgtgtgtatgtatatgcaccatgcagtgtcagaggaagcctgtggaagacatcacatctcctggatctggaggcagttgtgagctccccagtggtgctgggaattgaagtggggtcctcgagaaagcagcaacgactctgaactgcagagccaacgcgagcctgtttctgacttttagacagggtctcatataccatcagctgtcttcaaactggctctgttcctgaggagagccttgaatgagtccttctgtccccacaacccctcaacaggcatgggtcatggtgccttgtattctcaagatctgttaactgggaaatgtgtcttaaggacttctcctaagcaagtgaagttcatcaaatgtgaatgagcgtataacggaaattttccttttgaatttatagaaacagccacaaaagcaacagaataaaagccccagttgctgatggcaatgggtctgcaggcagggtgttgtcccccagcgatctcaccatgtacctctctgcctgcaagttcctggacacagcacttgccttccctccagacaagatgcccttgtttcagatgtaagtgggatgagcctttgaggtcctttgaagtccccgttttccctgctgttgggcacttgacttttctttcatgtgtagggagtgtgtgagaagctgcagtgttccaagcatctttgagcgactgagcctgggtttcagatttccccagacagctgtggcttcctgacttggctcacagtcctgtttgtgaatgtctctgtggagaatcagcatttttattgtctgctgagatggcctttgctactgtacgcctgtgactgggtcactgtgtgtgtgtgtgtgtgtgtgtgtgtgtgtgtgtgtgtgtgtgtgtatagctggagtgttctgctgcagttagatgagaaagctttatttggagcgtggcctctttggcacatgtttcccttgggcttaaaacagctgttcctgcctcaagtttcatgcctggctccagaggctacttgtctctggcttgccccggggaacaaagagacacttttgcgttcccttaaacggcagactgagaaggccacacgtgacatcatttcatttgtgtgatagcctagaaaatacaatatcataggaacaggagcgaagagcagtggctgctggggatggtttgggactgtgaggctgccataccggtcctttatggggacagatcatgcagcatcaaagaattattaagccactgggttgtggaaaccgtggacttgggagagttgcttgttggtgtaggtcaagcagttggcgcagactctgctctgtgcatgatgtctgcagaggggctgtgtgtgaccatattggatctgaggaaacttcacttccattcagtctagctgcaaacctaaaaacaaaaacaaaacagcacaaaagggagaaaagaggccatggaagtaagggctttcccacagcattgtgtacggtcccacagctggacaggcaacttatggtttatccacgtactgacatgtcagtcagcagtaaagagaaacaggagaccgctgccttctgctgagaagacactgggtgacagaggtggtccttggcaaggcgtgccccgtcccactcctgcaagcccagaatgagagagaggtgcacagataggaagccagttaggctagagactgagcagcaatggctgaagaaatgggacttcttggggcgataaaactctgagaaggattgtgctgtagacatatggtacgtctatgaagttattaagccactgggttgtggaatgtaaattacatcaactgaactactgcagacagtttacatgagctctgcatcaatgtgcctgactgaccctgtttgtttcctgcagttacagatgggcatttgttccagaagtggacactgagcacccagccttcctgtcagaactggaagagaatcaccaagaatgcaggcctcacactgtcaggattctagaacttctgaggtcaagatacggggtaagtgctttcagattcaacacccagcgatgaacctcagctggcaaagggcttgcctgttgcacaggcgcgctgggtgggatctacaaagcactgtataactgatggattgctgcatacccgtaatcccagcactggggatgtagaggcagagggatcagaagttgagggtcgcccttgggcacatagtgagttcaaggacagcccgggctgtgtaagacactgtctcaatgtgtgtgtgtttgtgtgtgtgtgtgtgtgtgtgtgtgtgtgtgtgtgtgtgtgtatacagtcacagcaaaggagacaagactatgcattatgaagtccttaatgtcgcttgggttttaaggacttcaaaacgtcttctcatagctttaaggcttgagatggttagaagttccatccttggccttttccatctctcaaacaactccagttcctgggaactaaagctggcttccccgtggaagaagaggagcctgctaggagcatggcggagctggagcagggcaggactggagcagggcagggcttaggatgtagccctgacagaaagggttaaggacctggaatgtgaggtctgcctctgtcatcagctggccaggggctaacagcccctgctgcaggggtcactagctaggtcactctggtggctttgggtctttctacaggaaatcggcagctccgacgagatcaccaggaagaaagagtttcctcttttgcgccaacattcagtttcctgcatcaggcagttgataccattcttcaccacgttaaactgtgctttcaaaacccaaagccagctgcctgctgatgtgccaggaaccgcagcgccagagtgccctgtcacagagaacccgagggtcctgcggcagctggaggagtgtgtggagcaggactttctggagcatccggagtgttagcgcctaggagggcttcttcattcttctccccacccctggccaggacagctgtgtgctgtaaagaagaggggactgggggatttgaaccaaccctgccacagtcctgaagtgctgttcaggtattttctgttcagcggccaaacatgtctcccttaaaggccttgtaatatattccagtcccagtttgtattcttcctcagtttatgtaatggaaataaaattaacatatcatctaaccaca

SEQ ID NO: 342 - DNA, 7041 bp, Mus musculus
ttgtttctgatccaggaaagcaaacatccgagagaaggaagaccagggtaggatcaaaccagaccaaagctgatgaaaccaagtcccccatgtgtccatgagagctgtaaccttcagtccagcctgggactctcagttacatcctttgacattcttgccccgcctgatgtgcggctgcggagatctctggacggtagtgtgggggaagagctgacactcagtcccactggcagtgccagctgtgttctcctgtgtgacttccagagaacactgtggctctccagagcaacctgaagtattccctcctaccacggcggctcatcatcagcaagaggctagctcagtgcttgcatcctgccctgcccagtggcgttcacctaaaagccctagaaacctacgagatcatcttcaagattgtgggaaccaaatggctggccaaggacttgttcttgtacagctgtggcttattccccctactggcctatgccgccatgtcggtccggcccgtgctgcttggcctgtatgagaagtacttcctcccgctgcagaagctgctcctgcccagtcttcaggccttccttgtgggtctgctgcccggcctggaagaaggctctgagatctatgaaagaactgacgccctgctcctgagactgtctgtggttgtggggcgagaggtgttctatgctgccctgtggggcagcgttctgacaagcccttccatccgcctccctgcctccttatttgtggtgaaccacatcagcagggactcaccaggcaaggagcagaagtgcatgctgggtactgattaccagctcacggtgagatccctgtgtgcttcactgctagacgccaatgttcttgtgcaaagaaataacctggagatcatcctgtttttcttcccgttttatacctgcctggaccctgaggagcgagccatccctcttctcagacgggatgttgtgcacatcctctcagctgccacccagacactcctgagaagggacatgtctctcaacagaagactctacgcctggttactaggttcagacattaaaggaaataccattgtgccaaaatctgaaatttcaaattcttacgaagaccaatgctcatacttttttgataaatactccaaggatcttttagttgaggctctggctgagatactgcaccagaagttcttagacgctgacttagaggagcgccaccatgcatatctgaagcctttccgaatccttgtcagtctgctggacaagccggaaataggacctcaagtggttgagaatttatttctggaagtcatcagggccttttattcttactgccacgatgtcctcggctctgaccttaagcttagctacactcagagtgggaatccactaataagcacaatcaaagaaaacagacacgcctcagagattgtgaagacggtcaacttgctagtctcatcgctcagctcagacttcctgtgggattacatggcacggcgtttcgaggcatgcttcagaccagtgacacaaaccacggctattggagaagccatcagccctccccccaccgtctcggagctctgcaccctcctggtgttcctcctggatgtaattcccttggaactctactctgaggtgcagactcagtacctcccacaggtgcttggctgcctgctgcagcctcttgccgaggaggtggaggccctgagcttacctgagctcacacacgccttgaagacatgtttcaaggtgcttagcaaagtccagatgccgccctcctacctagatctggagcccagcagcgggaactcgagtccagtaaaaggaagaaacagtggcatcgctatggaaacggaggccgtggtggcgggtgatgaggaaccttcctttcctccactgaagtctgaagacagtgggattgggctcagcgcctcgtcgccagagctctctgagcacctcagggtgcctcgggtgtctgcggaaagagacgacatctggaagaaagacgggaccatgcaggcgacatttctctgcatccaggagctcattgcaaactttgccagcaagaacatctttgcagcgtcgctgactgtgtctggggaggaaaacaagcccgaggagcccccagggaagggcaacaagggccagacacagagcaccgagcaccctggcaggaagagctcctgggaccctaagcccatcaccgtgccccagtttaaacagatgctttcggacttgttcacggttcgagggtctccctttaagacaagaagctcagagtcgctgtcgtctgtgcccagcagcccacacaggaaggcagcaaccgaatggggtgttgaccaggtggtcgttgagttggtgggctccaaggaagactgcagggaggccttggctgccgcctgccacctgctgctggactgtgccaccttccctgtgtatctgtctgaggaggagactgagcagctatgtgagacgctcttccagactccaggagccagcgattgcagttttcctccgtggctgaaatccctcatgacaatttgctgctgtgtgagcgactgctccctccagaacatagccatcgccacactgctggaagtgataaaccactcccagtccctcgctcttgtcatcgaagacaagatgaagcgctacaaaacctctgggaacaaccctttttttggcaagttacagatggtgacagtccctcccattgctcctgggatactgaaagtcattgccgagaaaacagacttctatcagagggtggctcgtgtgctctggaaccagctgaacaaggagacccgtgaacatcacatcacctgtgtagagctgttctaccgcctgcactgcctggccccgactgccaacatctgtgaggatatcatctgccatgccctcctggaccctgacaagggaacaaggttggaagctctgtttaggttttctgtgatctggcacctgacacgagaaatccaaggtagtcgtgtgacgtcccacaatcgctcctttgacaggtccttgtttgtcgtcctggatagcctggcttgcacagacggtgctatcagtgcagcagcccagggctggctggtgcgagcgctctccctcggggatgtggcccgcatcctcgaacccatgctcctgctgttgctccagcccaaaacccagaggacgtccatccagtgtctcaagcaggagaactcagccgaggatttacaccgttggtttaacaggaagaagcccacgtgcaaagaggcgtgtggtgaatctgagccgcaggagggtgcccctgaggaacgcctgcctcgaggacagttcaccaccgtggatcgagaagccatctgggctgaagtagagaaggaaccagagaaatgcccaccaagaagtgatctaagtgaggaagacctgccctactatgtggaccttccagacaggatgacctctggtggcggggatagcagtgagcacacagagtctgcagacacgagctctggccacactgacagtgagaacacatccactttctcatctccctcccacgatctgcaggacctgagccacgaggaaaactgctgtgctccgatccccatcgggggcagggcatactccaagcgagcggccttgctggcagccttccagccagaaagccccaggtccaatgccaggttaagcctggtgcgagcagactcagacaagacacaggcttccgagtcgttttccagtgacgaggaggctgacgtggagctccaagccatcaccacatcgaggctgttgaagcagcagagggagaagcaggagacagtcgaggccttgttcaaacacatcttgctctacctgcagccctacgactcccagagggtcctgtatgccttctccgtactggaggccgtgcttaagaccaatcccaaggagttcattgaggctgtgtccaggacgggcatagacaccagctccaccgcgcacctcaacctcatctccaacctcctggcacgccaccaggaggccctcatcggccagagcttttatggcaagctgcagacccaggcccccaatgtctgcccccactccctgctcattgaactccttacctacctctgcctgagcttcctccgctcctactacccctgctacctgaaggtctgccacagggacatccttggcaaccgcgacgtgcaggtcaagagcgtggaggtcctcattaggattacagcacagctggtctccatggccaagtcggcggaagggaagaacacggagttcatccacagcctgctgcagaggtgcaaggtccaggagttcgtcctgctctcgctgtccgcgtccatgtacaccagccagaagcgctacggcctggccaccgccgaccggggcggcaggctcctcgcggaggacagcctctttgaggagagcctcatcaatctggggcaggaccagatctggagcgagcacccactgcagatcgagctgctcaagctgctgcaggccctcatcgtcctggagcaccacctgggccagggccaggaggaggcggagactcagccggccctatcccgagagtggcagagggctctcaacttccagcaggccatcggtgccatgcagtacgtgcagccccaccccctcacctcccagggccttctggtctcagctgtggtgagagggctgcagcccgcctatggctacggcatgcaccccgcctgggtgagcctggtcacgcattccttgccatactttggaaagtctctgggctggacagtgacaccctttgttatccagatttgcaaaaatttggacgatctggtcaagcaatatgaaagtgaatctgtcaagttcaccatcagtacaacctcaaagaaggaaaacatttctcctgactacccgctcactcttctggaaggtcttacgaccattagccatttttgtcttttggaacagcctacccaacataaaaagactgctgccgtaagcgatcccatcaacctgagaaatgccaagaacgccattttggaagagctacctcgaatagtgaacaccatggcccttatctggaatgttctcagaaaggaggaaactcagaagagaccagtggatctcctgggagccaccaaagggtcatcctctgtttactttaaaaccaccaagaccatcagacaaaaaattttagacttgctgaaccccttgacaggccatcttggggtccagctgatagctgcggttgccaccgtgtggaacagaaagcaggcacggcgccacagcaagaccaagatggtccccgtggcaaacacgtcccagcacacccttgtcgacctggtctgtgctctcagcaccctgcagacagactcagtgctgcagctggtgaaggaggtggtgaagaggccagcgcagatcaaaggggatgagaagtctcccctggtggacattcctgtgttgcagttctgctatgctttcatccaaagactgtccataccagacctgcaggaggccttcccttccctcctgggcgtcctgaaggaggctgcgcagctgaacctggctccccctggatactttctgcttctcagcatgttgaatgactttgtgacaagaacacccaacctggaaagcaagaaggaccaaaaagacctgcaggttctggcttctctcctggacatggtttaccgcagcgacgagaaagagaaagctgtaccactaatctcccgcttgctatactacgtgtttccttacctgcgcaatcacagtgcgtacaatgctcccagcttccgagccggcgcccagctgctgagctccctgagtggctatgcctacaccaagcgggcgtggaagaaggaagtgctggagctgttcttggaccccgctttctttcagatggatacgtcttgcgtccactggaagtccgtcattgaccatctcctgactcacgagaaaaccatgtttaaggatttaatgaacatgcagagcagttccttaaaactcttctccagctttgagcagaaggccatgctgctgaagcgccaggcttttgccgtcttcagtggcgagcttgaccagtaccacctctaccttcccctgatacaagagcgcctgacagacaacctcagagtcggacagacgtccatagttgctggtcagatgtttctttttttcagagttctgctgctaagaatctctccccagcacctgacctcgctgtggcccatcatggtgtctgaattgatccagacattcatacaacttgaggaagatctgaaagaggaagatgaatcaagaaacagccacaaaagcaacagaataaaagccccagttgctgatggcaatgggtctgcaggcagggtgttgtcccccagcgatctcaccatgtacctctctgcctgcaagttcctggacacagcacttgccttccctccagacaagatgcccttgtttcagatttacagatgggcatttgttccagaagtggacactgagcacccagccttcctgtcagaactggaagagaatcaccaagaatgcaggcctcacactgtcaggattctagaacttctgaggtcaagatacggggaaatcggcagctccgacgagatcaccaggaagaaagagtttcctcttttgcgccaacattcagtttcctgcatcaggcagttgataccattcttcaccacgttaaactgtgctttcaaaacccaaagccagctgcctgctgatgtgccaggaaccgcagcgccagagtgccctgtcacagagaacccgagggtcctgcggcagctggaggagtgtgtggagcaggactttctggagcatccggagtgttagcgcctaggagggcttcttcattcttctccccacccctggccaggacagctgtgtgctgtaaagaagaggggactgggggatttgaaccaaccctgccacagtcctgaagtgctgttcaggtattttctgttcagcggccaaacatgtctcccttaaaggccttgtaatatattccagtcccagtttgtattcttcctcagtttatgtaatggaaataaaattaacatatcatctaaccaca

SEQ ID NO: 343 - protein, 2082 aa, Mus musculus
MSVRPVLLGEKYFLPLQKLLLPSLQAFLVGLLPGLEEGSEIYERTDALLLRLSVVVGREVFYAALWGSVLTSPSIRLPASLFVVNHRDSPGKEQKCMLGTDYQLTVRSLCASLLDANVLVQRNNLEIILFFFPFYTCLDPEERAIPLLRRDVVHILSAATQTLLRRDMSLNRRLYAWLLGSDIKGNTIVPKSEISNSYEDQCSYFFDKYSKDLLVEAEILHQKFLDADLEERHHAYLKPFRILVSLLDKPEIGPQVVENLFLEVIRAFYSYCHDVLGSDLKLSYTQSGNPLISTIKENRHASEIVKTVNLLVSSLSSDFLWDYMARRFEACFRPVTQTTAIGEAISPPPTVSELCTLLVFLLDVIPLEKEVQTQYLPQVLGCLLQPLAEEVEALSLPELTHALKTCFKVLSKVQMPPSYLDLEPSSGNSSPVKGRNSGIAMEAVVAGDEEPSFPPLKSEDSGIGLSASSPELSEHLRVPRVSAERDDIWKKDGTMQATFLCIQELIANFASKNIFAASLTVSGEENKPEEPPGKGNKGQTQSTEHPGRKSSWDPKPITVPQFKQMLSDLFTVRGSPFKTRSSESLSSVPSSPHRKAATEWGVDQVVVELVGSKEDCREAAACHLLLDCATFPVYLSEEETEQLCETLFQTPGASDCSFPPWLKSLMTICCCVSDCSLQNIAIATLLEVINHSQSLALVIEDKMKRYKTSGNNPFFGKLQMVTVPPIAPGILKVIAEKTDFYQRVARVLWNQLNKETREHHITCVELFYRLHCLAPTANICEDIICHALLDPDKGTRLEALFRFSVIWHLTREIQGSRVTSHNRSFDRSLFVVLDSLACTDGAISAAAQGWLVRALSLGDVARIPMLLLLLQPKTQRTSIQCLKQENSAEDLHRWFNRKKPTCKEACGESEPQEGAPEERLPRGQFTTVDREAIWAEVEKEPEKCPPRSDLSEEDLPYYVDLPDRMTSGGGDSSEHTESADTSSGHTDSENTSTFSSPSHDLQDLSHEENCCAPIPIGGRAYSKRAALLAAFQPESPRSNARLSLVRADSDKTQASESFSSDEEADVELQAITTSRLLKQQREKQETVEALFKHILLYLQPYDSQRVLYAFSVLEAVLKTNPKEFIEAVSRTGIDTSSTAHLNLISNLLARHQEALIGQSFYGKLQTQAPNVCPHSLLIELLTYLCLSFLRSYYPCYLKVCHRDILGNRDVQVKSVEVLIRITAQLVSMAKSAEGKNTEFIHSLLQRCKVQEFVLLSLSASMYTSQKRYGLATADRGGRLLAEDSLFEESLINLGQDQIWSEHPLQIELLKLLQALIVLEHHLGQGQEEAETQPALSREWQRALNFQQAIGAMQYVQPHPLTSQGLLVSAVVRGLQPAYGYGMHPAWVSLVTHSLPYFGKSLGWTVTPFVIQICKNLDDLVKQYESESVKFTISTTSKKENISPDYPLTLLEGLTTISHFCLLEQPTQHKKTAAVSDPINLRNAKNAIELPRIVNTMALIWNVLRKEETQKRPVDLLGATKGSSSVYFKTTKTIRQKILDLLNPLTGHLGVQLIAAVATVWNRKQARRHSKTKMVPVANTSQHTLVDLVCALSTLQTDSVLQLVKEVVKRPAQIKGDEKSPLVDIPVLQFCYAFIQRLSIPDLQEAFPSLLGVLKEAAQLNLAPPGYFLLLSMLNDFVTRTPNLESKKDQKDLQVLASLLDMVYRSDEKEKAVPLISRLLYYVFPYLRNHSAYNAPSFRAGAQLLSSLSGYAYTKRAWKKEVLELFLDPAFFQMDTSCVHWKSVIDHLLTHEKTMFKDLMNMQSSSLKLFSSFEQKAMLLKRQAFAVFSGELDQYHLYLPLIQERLTDNLRVGQTSIVAGQMFLFFRVLLLRISPQHLTSLWPIMVSELIQTFIQLEEDLKEEDESRNSHKSNRIKAPVADGNGSAGRVLSPSDLTMYLSACKFLDTAFPPDKMPLFQIYRWAFVPEVDTEHPAFLSELEENHQECRPHTVRILLRSRYGEIGSSDEITRKKEFPLLRQHSVSCIRQLIPFFTTLNCAFKTQSQLPADVPGTAAPECPVTENPRVLRQLEECVEQDFLEHPEC

SEQ ID NO: 344 - DNA, 1246 bp, Mus musculus
acctgctgtcccctgggagtccttgtggtgggaccagccagtgttaagatgtaggtgttggtctcacgtgtgtgtatgtatatgcaccatgcagtgtcagaggaagcctgtggaagacatcacatctcctggatctggaggcagttgtgagctccccagtggtgctgggaattgaagtggggtcctcgagaaagcagcaacgactctgaactgcagagccaacgcgagcctgtttctgacttttagacagggtctcatataccatcagctgtcttcaaactggctctgttcctgaggagagccttgaatgagtccttctgtccccacaacccctcaacaggcatgggtcatggtgccttgtattctcaagatctgttaactgggaaatgtgtcttaaggacttctcctaagcaagtgaagttcatcaaatgtgaatgagcgtataacggaaattttccttttgaatttatagaaacagccacaaaagcaacagaataaaagccccagttgctgatggcaatgggtctgcaggcagggtgttgtcccccagcgatctcaccatgtacctctctgcctgcaagttcctggacacagcacttgccttccctccagacaagatgcccttgtttcagatttacagatgggcatttgttccagaagtggacactgagcacccagccttcctgtcagaactggaagagaatcaccaagaatgcaggcctcacactgtcaggattctagaacttctgaggtcaagatacggggaaatcggcagctccgacgagatcaccaggaagaaagagtttcctcttttgcgccaacattcagtttcctgcatcaggcagttgataccattcttcaccacgttaaactgtgctttcaaaacccaaagccagctgcctgctgatgtgccaggaaccgcagcgccagagtgccctgtcacagagaacccgagggtcctgcggcagctggaggagtgtgtggagcaggactttctggagcatccggagtgttagcgcctaggagggcttcttcattcttctccccacccctggccaggacagctgtgtgctgtaaagaagaggggactgggggatttgaaccaaccctgccacagtcctgaagtgctgttcaggtattttctgttcagcggccaaacatgtctcccttaaaggccttgtaatatattccagtcccagtttgtattcttcctcagtttatgtaatggaaataaaattaacatatc

SEQ ID NO: 345 - protein, 147 aa, Mus musculus
MYLSACKFLDTAFPPDKMPLFQIYRWAFVPEVDTEHPAFLSELEENHQECRPHTVRILLRSRYGEIGSSDEITRKKEFPLLRQHSVSCIRQLIPFFTTLNCAFKTQSQLPADVPGTAAPECPVTENPRVLRQLEECVEQDFLEHPEC

SEQ ID NO: 346 - DNA, 7191 bp, Mus musculus
cgccttcgaggtctctgccgaagcgcagagccgccttgtcccgcagccgacgggctccgtcccacgcccaccgccgaggtccgcggccgccgatccctccttctgtgaggatgtaagatggacccggaggagcaggagctactgaacgattacagatacagaagctactcctcagtaatcgagaaggcgttgagaaactttgagtcctccagcgaatgggcagatctcatctcttcgctcggcaagctcaacaaggctctccagagcaacctgaagtattccctcctaccacggcggctcatcatcagcaagaggctagctcagtgcttgcatcctgccctgcccagtggcgttcacctaaaagccctagaaacctacgagatcatcttcaagattgtgggaaccaaatggctggccaaggacttgttcttgtacagctgtggcttattccccctactggcctatgccgccatgtcggtccggcccgtgctgcttggcctgtatgagaagtacttcctcccgctgcagaagctgctcctgcccagtcttcaggccttccttgtgggtctgctgcccggcctggaagaaggctctgagatctatgaaagaactgacgccctgctcctgagactgtctgtggttgtggggcgagaggtgttctatgctgccctgtggggcagcgttctgacaagcccttccatccgcctccctgcctccttatttgtggtgaaccacatcagcagggactcaccaggcaaggagcagaagtgcatgctgggtactgattaccagctcacggtgagatccctgtgtgcttcactgctagacgccaatgttcttgtgcaaagaaataacctggagatcatcctgtttttcttcccgttttatacctgcctggaccctgaggagcgagccatccctcttctcagacgggatgttgtgcacatcctctcagctgccacccagacactcctgagaagggacatgtctctcaacagaagactctacgcctggttactaggttcagacattaaaggaaataccattgtgccaaaatctgaaatttcaaattcttacgaagaccaatgctcatacttttttgataaatactccaaggatcttttagttgaggctctggctgagatactgcaccagaagttcttagacgctgacttagaggagcgccaccatgcatatctgaagcctttccgaatccttgtcagtctgctggacaagccggaaataggacctcaagtggttgagaatttatttctggaagtcatcagggccttttattcttactgccacgatgtcctcggctctgaccttaagcttagctacactcagagtgggaatccactaataagcacaatcaaagaaaacagacacgcctcagagattgtgaagacggtcaacttgctagtctcatcgctcagctcagacttcctgtgggattacatggcacggcgtttcgaggcatgcttcaggagaccagtgacacaaaccacggctattggagaagccatcagccctccccccaccgtctcggagctctgcaccctcctggtgttcctcctggatgtaattcccttggaactctactctgaggtgcagactcagtacctcccacaggtgcttggctgcctgctgcagcctcttgccgaggaggtggaggccctgagcttacctgagctcacacacgccttgaagacatgtttcaaggtgcttagcaaagtccagatgccgccctcctacctagatctggagcccagcagcgggaactcgagtccagtaaaaggaagaaacagtggcatcgctatggaaacggaggccgtggtggcgggtgatgaggaaccttcctttcctccactgaagtctgaagacagtgggattgggctcagcgcctcgtcgccagagctctctgagcacctcagggtgcctcgggtgtctgcggaaagagacgacatctggaagaaagacgggaccatgcaggcgacatttctctgcatccaggagctcattgcaaactttgccagcaagaacatctttgcagcgtcgctgactgtgtctggggaggaaaacaagcccgaggagcccccagggaagggcaacaagggccagacacagagcaccgagcaccctggcaggaagagctcctgggaccctaagcccatcaccgtgccccagtttaaacagatgctttcggacttgttcacggttcgagggtctccctttaagacaagaagctcagagtcgctgtcgtctgtgcccagcagcccacacaggaaggcagcaaccgaatggggtgttgaccaggtggtcgttgagttggtgggctccaaggaagactgcagggaggccttggctgccgcctgccacctgctgctggactgtgccaccttccctgtgtatctgtctgaggaggagactgagcagctatgtgagacgctcttccagactccaggagccagcgattgcagttttcctccgtggctgaaatccctcatgacaatttgctgctgtgtgagcgactgctccctccagaacatagccatcgccacactgctggaagtgataaaccactcccagtccctcgctcttgtcatcgaagacaagatgaagcgctacaaaacctctgggaacaaccctttttttggcaagttacagatggtgacagtccctcccattgctcctgggatactgaaagtcattgccgagaaaacagacttctatcagagggtggctcgtgtgctctggaaccagctgaacaaggagacccgtgaacatcacatcacctgtgtagagctgttctaccgcctgcactgcctggccccgactgccaacatctgtgaggatatcatctgccatgccctcctggaccctgacaagggaacaaggttggaagctctgtttaggttttctgtgatctggcacctgacacgagaaatccaaggtagtcgtgtgacgtcccacaatcgctcctttgacaggtccttgtttgtcgtcctggatagcctggcttgcacagacggtgctatcagtgcagcagcccagggctggctggtgcgagcgctctccctcggggatgtggcccgcatcctcgaacccatgctcctgctgttgctccagcccaaaacccagaggacgtccatccagtgtctcaagcaggagaactcagccgaggatttacaccgttggtttaacaggaagaagcccacgtgcaaagaggcgtgtggtgaatctgagccgcaggagggtgcccctgaggaacgcctgcctcgaggacagttcaccaccgtggatcgagaagccatctgggctgaagtagagaaggaaccagagaaatgcccaccaagaagtgatctaagtgaggaagacctgccctactatgtggaccttccagacaggatgacctctggtggcggggatagcagtgagcacacagagtctgcagacacgagctctggccacactgacagtgagaacacatccactttctcatctccctcccacgatctgcaggacctgagccacgaggaaaactgctgtgctccgatccccatcgggggcagggcatactccaagcgagcggccttgctggcagccttccagccagaaagccccaggtccaatgccaggttaagcctggtgcgagcagactcagacaagacacaggcttccgagtcgttttccagtgacgaggaggctgacgtggagctccaagccatcaccacatcgaggctgttgaagcagcagagggagaagcaggagacagtcgaggccttgttcaaacacatcttgctctacctgcagccctacgactcccagagggtcctgtatgccttctccgtactggaggccgtgcttaagaccaatcccaaggagttcattgaggctgtgtccaggacgggcatagacaccagctccaccgcgcacctcaacctcatctccaacctcctggcacgccaccaggaggccctcatcggccagagcttttatggcaagctgcagacccaggcccccaatgtctgcccccactccctgctcattgaactccttacctacctctgcctgagcttcctccgctcctactacccctgctacctgaaggtctgccacagggacatccttggcaaccgcgacgtgcaggtcaagagcgtggaggtcctcattaggattacagcacagctggtctccatggccaagtcggcggaagggaagaacacggagttcatccacagcctgctgcagaggtgcaaggtccaggagttcgtcctgctctcgctgtccgcgtccatgtacaccagccagaagcgctacggcctggccaccgccgaccggggcggcaggctcctcgcggaggacagcctctttgaggagagcctcatcaatctggggcaggaccagatctggagcgagcacccactgcagatcgagctgctcaagctgctgcaggccctcatcgtcctggagcaccacctgggccagggccaggaggaggcggagactcagccggccctatcccgagagtggcagagggctctcaacttccagcaggccatcggtgccatgcagtacgtgcagccccaccccctcacctcccagggccttctggtctcagctgtggtgagagggctgcagcccgcctatggctacggcatgcaccccgcctgggtgagcctggtcacgcattccttgccatactttggaaagtctctgggctggacagtgacaccctttgttatccagatttgcaaaaatttggacgatctggtcaagcaatatgaaagtgaatctgtcaagttcaccatcagtacaacctcaaagaaggaaaacatttctcctgactacccgctcactcttctggaaggtcttacgaccattagccatttttgtcttttggaacagcctacccaacataaaaagactgctgccgtaagcgatcccatcaacctgagaaatgccaagaacgccattttggaagagctacctcgaatagtgaacaccatggcccttatctggaatgttctcagaaaggaggaaactcagaagagaccagtggatctcctgggagccaccaaagggtcatcctctgtttactttaaaaccaccaagaccatcagacaaaaaattttagacttgctgaaccccttgacaggccatcttggggtccagctgatagctgcggttgccaccgtgtggaacagaaagcaggcacggcgccacagcaagaccaagatggtccccgtggcaaacacgtcccagcacacccttgtcgacctggtctgtgctctcagcaccctgcagacagactcagtgctgcagctggtgaaggaggtggtgaagaggccagcgcagatcaaaggggatgagaagtctcccctggtggacattcctgtgttgcagttctgctatgctttcatccaaagactgtccataccagacctgcaggaggccttcccttccctcctgggcgtcctgaaggaggctgcgcagctgaacctggctccccctggatactttctgcttctcagcatgttgaatgactttgtgacaagaacacccaacctggaaagcaagaaggaccaaaaagacctgcagcaaacaagctggctcagcagaaatctggaggtgaaagcccaacctcaggtctctctggaagagtcagatgccgaggacgacgtgcacagtgctgctgaagcctccaccatggtatctgcttctgccccctccgtttacagtgtgcaagcgctctctctcttggcagaggttctggcttctctcctggacatggtttaccgcagcgacgagaaagagaaagctgtaccactaatctcccgcttgctatactacgtgtttccttacctgcgcaatcacagtgcgtacaatgctcccagcttccgagccggcgcccagctgctgagctccctgagtggctatgcctacaccaagcgggcgtggaagaaggaagtgctggagctgttcttggaccccgctttctttcagatggatacgtcttgcgtccactggaagtccgtcattgaccatctcctgactcacgagaaaaccatgtttaaggatttaatgaacatgcagagcagttccttaaaactcttctccagctttgagcagaaggccatgctgctgaagcgccaggcttttgccgtcttcagtggcgagcttgaccagtaccacctctaccttcccctgatacaagagcgcctgacagacaacctcagagtcggacagacgtccatagttgctggtcagatgtttctttttttcagagttctgctgctaagaatctctccccagcacctgacctcgctgtggcccatcatggtgtctgaattgatccagacattcatacaacttgaggaagatctgaaagaggaagatgaatcaagaaacagccacaaaagcaacagaataaaagccccagttgctgatggcaatgggtctgcaggcagggtgttgtcccccagcgatctcaccatgtacctctctgcctgcaagttcctggacacagcacttgccttccctccagacaagatgcccttgtttcagatttacagatgggcatttgttccagaagtggacactgagcacccagccttcctgtcagaactggaagagaatcaccaagaatgcaggcctcacactgtcaggattctagaacttctgaggtcaagatacggggaaatcggcagctccgacgagatcaccaggaagaaagagtttcctcttttgcgccaacattcagtttcctgcatcaggcagttgataccattcttcaccacgttaaactgtgctttcaaaacccaaagccagctgcctgctgatgtgccaggaaccgcagcgccagagtgccctgtcacagagaacccgagggtcctgcggcagctggaggagtgtgtggagcaggactttctggagcatccggagtgttagcgcctaggagggcttcttcattcttctccccacccctggccaggacagctgtgtgctgtaaagaagaggggactgggggatttgaaccaaccctgccacagtcctgaagtgctgttcaggtattttctgttcagcggccaaacatgtctcccttaaaggccttgtaatatattccagtcccagtttgtattcttcctcagtttatgtaatggaaataaaattaacatatcatctaaccac

SEQ ID NO: 347 - protein, 2255 aa, Mus musculus
MDPEEQELLNDYRYRSYSSVIEKALRNFESSSEWADLISSLGKLNKALQSNLKYSLLPRRLIISKRLAQCLHPALPSGVHLKALETYEIIFKIVGTKWLAKDLFKCGLFPLLAYAAMSVRPVLLGEKYFLPLQKLLLPSLQAFLVGLLPGLEEGSEIYERTDALLLRLSVVVGREVFYAALWGSVLTSPSIRLPASLFVVNHRDSPGKEQKCMLGTDYQLTVRSLCASLLDANVLVQRNNLEIILFFFPFYTCLDPEERAIPLLRRDVVHILSAATQTLLRRDMSLNRRLYAWLLGSDIKGNTIVPKSEISNSYEDQCSYFFDKYSKDLLVEAEILHQKFLDADLEERHHAYLKPFRILVSLLDKPEIGPQVVENLFLEVIRAFYSYCHDVLGSDLKLSYTQSGNPLISTIKENRHASEIVKTVNLLVSSLSSDFLWDYMARRFEACFRRPVTQTTAIGEAISPPPTVSELCTLLVFLLDVIPLEKEVQTQYLPQVLGCLLQPLAEEVEALSLPELTHALKTCFKVLSKVQMPPSYLDLEPSSGNSSPVKGRNSGIAMEAVVAGDEEPSFPPLKSEDSGIGLSASSPELSEHLRVPRVSAERDDIWKKDGTMQATFLCIQELIANFASKNIFAASLTVSGEENKPEEPPGKGNKGQTQSTEHPGRKSSWDPKPITVPQFKQMLSDLFTVRGSPFKTRSSESLSSVPSSPHRKAATEWGVDQVVVELVGSKEDCREAAACHLLLDCATFPVYLSEEETEQLCETLFQTPGASDCSFPPWLKSLMTICCCVSDCSLQNIAIATLLEVINHSQSLALVIEDKMKRYKTSGNNPFFGKLQMVTVPPIAPGILKVIAEKTDFYQRVARVLWNQLNKETREHHITCVELFYRLHCLAPTANICEDIICHALLDPDKGTRLEALFRFSVIWHLTREIQGSRVTSHNRSFDRSLFVVLDSLACTDGAISAAAQGWLVRALSLGDVARIPMLLLLLQPKTQRTSIQCLKQENSAEDLHRWFNRKKPTCKEACGESEPQEGAPEERLPRGQFTTVDREAIWAEVEKEPEKCPPRSDLSEEDLPYYVDLPDRMTSGGGDSSEHTESADTSSGHTDSENTSTFSSPSHDLQDLSHEENCCAPIPIGGRAYSKRAALLAAFQPESPRSNARLSLVRADSDKTQASESFSSDEEADVELQAITTSRLLKQQREKQETVEALFKHILLYLQPYDSQRVLYAFSVLEAVLKTNPKEFIEAVSRTGIDTSSTAHLNLISNLLARHQEALIGQSFYGKLQTQAPNVCPHSLLIELLTYLCLSFLRSYYPCYLKVCHRDILGNRDVQVKSVEVLIRITAQLVSMAKSAEGKNTEFIHSLLQRCKVQEFVLLSLSASMYTSQKRYGLATADRGGRLLAEDSLFEESLINLGQDQIWSEHPLQIELLKLLQALIVLEHHLGQGQEEAETQPALSREWQRALNFQQAIGAMQYVQPHPLTSQGLLVSAVVRGLQPAYGYGMHPAWVSLVTHSLPYFGKSLGWTVTPFVIQICKNLDDLVKQYESESVKFTISTTSKKENISPDYPLTLLEGLTTISHFCLLEQPTQHKKTAAVSDPINLRNAKNAIELPRIVNTMALIWNVLRKEETQKRPVDLLGATKGSSSVYFKTTKTIRQKILDLLNPLTGHLGVQLIAAVATVWNRKQARRHSKTKMVPVANTSQHTLVDLVCALSTLQTDSVLQLVKEVVKRPAQIKGDEKSPLVDIPVLQFCYAFIQRLSIPDLQEAFPSLLGVLKEAAQLNLAPPGYFLLLSMLNDFVTRTPNLESKKDQKDLQQTSWLSRNLEVKAQPQVSLEESDAEDDVHSAAEASTMVSASAPSVYSVQALSLLAEVLASLLDMVYRSDEKEKAVPLISRLLYYVFPYLRNHSAYNAPSFRAGAQLLSSLSGYAYTKRAWKKEVLELFLDPAFFQMDTSCVHWKSVIDHLLTHEKTMFKDLMNMQSSSLKLFSSFEQKAMLLKRQAFAVFSGELDQYHLYLPLIQERLTDNLRVGQTSIVAGQMFLFFRVLLLRISPQHLTSLWPIMVSELIQTFIQLEEDLKEEDESRNSHKSNRIKAPVADGNGSAGRVLSPSDLTMYLSACKFLDTAFPPDKMPLFQIYRWAFVPEVDTEHPAFLSELEENHQECRPHTVRILLRSRYGEIGSSDEITRKKEFPLLRQHSVSCIRQLIPFFTTLNCAFKTQSQLPADVPGTAAPECPVTENPRVLRQLEECVEQDFLEHPEC

SEQ ID NO: 348 - DNA, 129400 bp, Homo sapiens
ttcatctcccacagtgcctggcccagaagccttgctaaatatttgaacaggattgcccagtgagtttgtgcacagttgtgtttgtggacacgtgtcttctgtagctctgggttgggaatgatttgtatccccaaatggctctctcatttggttattttttgatttgcttttagatacttttctgctgtgagaatgtaagatggatccagaagagcaggagctcttaaatgattacagatacagaagctactcttcagtgattgaaaaggctttgagaaattttgagtcctcgagtgaatgggcggatctcatatcttcacttggcaaactcaacaaggtatgtagggtgtatcctatttggattgcatggaggtggggacgtaattgtctttttattattataagaaattacatgattatattatttgtattttataatctttatatcattacatattatacagtataatctttatattatttcaaggaaataccattatatatacaatgatgattacaataattagaaaatatagaaaagaaaaaaaccactcataattctgtcctccagtgttacccactgttaacctatcaatgtatgtacctccttccagctttttctgagcataaaaatatatatagtgttcgtatagttgaagtctttttcttaacaatgttaatgtctagacaagataaaatttaaaatggtcaaattaggtattcaaagactgttctttgtatactccttaggatttttatttatttttcttctttgatctacttttttgatccttttactgctgtctggtaactcctagaagaataaaagttgaaataaatattgaaatctgcccaaaacttgtgtgtgtgtgtgcatgtgtgtgcatacgtgtgtgcatgtgtgtgtatggggtcagatctaggaaaaccaaaactggtcacacgtgggcttgaccttgtactctatatcaggggtccccaacccccaggccgctgaccggtaccagtccgtggcctattaggaaccgggacgcacagcaggaggtgagcggtgcgagcgagcattaccgcttgggctctgcctcctgtcagattagtggtggcactgggttctcactggagcataaaccctatcgtgaactgcacatgtgagggatctaggttgcatgctctttaggagaatctttttttttttttttttgagacagtctcactctgttgcccaggttggagtgcaatggcgcaaccttggctgactgcaacctccacctcccaggttcaagcgattactcctgcctcagccacccaagtagttgggattacaggcacgtgccaccacacctggctaatttttgtatttttagtagagactgggtttcaccatgttggccaggctggtctcgaactcctgacctcaagtgatccacccacctcggcctcccaaagtgctggggtcacaggcgtgagccaccacacctggccactctttatgagaatctaactaatacctgatgatctgaggtggtacaacagcagatctacagtttcatcctgaaaccaaccatgcgccctcccacccatctgccaccccatctgtggagaaattgtcttccacgtggccagacgtggtggctcacacctgtaatcccagcactttgggaggccaaggtgagtggcggatcacaaaatcaggagatcgagaccatcctggctaacgcggtgaaaccctgtctctactaaaaatacaaaaaaattagccgggcgtggtggcgagcacctgtagtcccagcttctcaggaggctgaggcaggagaatggcgtgaaccagggaggcggagcttgcagtgagctgagattgcaccactgccctccatcctgggtgacagagcaagactccgtctcaaaaaaaaaaaaattgtcttccacgaaactggtccctggtgccaaaaaggttgggaaccacatctctatataagtgacatatagatgggagcattatattttcccatcctttctttcccagaaagaaagtgacacagggactttcaagcgctcagatgaccactacaacatgtaggtagatgatatctgggcttagataagctgtacctggctctgttgctgttcagacaggacctgagtttggagcccaagtgctaggtgggagttaggagatgtctaactctactctgcagatctcagctccccaggccaaacacaccaggggaactggggtgagtgaagaatttcagcagcctgaccctccagccctgacagatggctatcaggcacgctgcagatgggcagttcttacagctcgtggccagtaagctgctggtcttttgcaaggtatatttacgacctgtaaatgtcacggctccgtgctggctggggtggataaatgtttctaaggtctttaaaacaggaaataagagcttgcaaattctttggttttacagctctatctcaggaattctctaggtgaatgcagattgcattcgcagacttgctctgaaggtggattgctttttgaggggaaagggagaagcagtagaaccgcattgagtcccacattcttctggatgtttcacttttcagtactcagccctcctggagtctaagaacagcctactttttctttcttttctttttctttttgaaacagtcttgctctgtcacccaggctggagtgcagtgacacgatctcggctcatgacaacctgagcctcccaggttcaagcgattctcctgccacagcctcctgagtagctgagattagaggtgcccgccaccaggcctggctaatttttttgtatttgtagtagagatggggtttcaccatgttggccaggctggtctcgaactcctgacctcaagtgatccgcccacctcagcctcccaaagtacagggattacaggcatgagccaccgtgcccagccgaacagcatatttattgttggggagggcacagtcttcattatttctgttttttctttttctttattgagataaaattcacataacacaaaattcaccatttacccattttaaagtgcacagttaagtggcctttagtatgtttaccatgttgtgtaacccttactatctagttccacacattttcatcactccaaaaggaaacccgtacccattcagcagttcctccccattcctccctccccccagccccggtaaccacgaatctactttccctctctacggactttccatggaaatggaatcataccacatgtggctttttgtgactggtttatttcatttagcataatgttcttaaggttcatccatgttatagtatgtgttagaattaccttcctttttacagctgaataatactctattgtatgggtaagtcacattttcttttcttttcttttctttttttttttttttttttttttttcgagatggaatctcactctgtcatccaggctgaagtgcagtggcacagtctcggctaactgcaacctccaccttctaggttgaagcgattctcctgcctcagcctcccgagtaactgagactacaggcgcacaccaccacacccggctaatttttgtatttttagtagagacagggtttcaccatgttggccaggctggtcttgaactcctgacctccagtgatctgcctgccttggcctcccaaagtgctgggattatagacatgagccaccgcgccgagccacatttttctttatccattgatcagttgatggacatttagatttttaccttttggctattgtgaatagtgttgctatgagcattcatttgcaagcttttgtttgaacctcagttttcaattctttggggtgcatacttaggaggggcattgctgggacatacggaaacgctatgtttaacttactgaggagccaccaaattgttttcccagcagttgcaccattttacatatccaccaaaagcaatgcgtgagtgttccaatttcctaacatcctcaccaatacttattttcaagtttttttttttttgacactcgctctgttgcccaggctggagtgcagttgtgcaatcttggctcctgcaacctccacctcctgggttcaagcgattctcatccctcagcctcctgagtagctggggttataggcgttagcgaccatgcctggctaattttttatttttactttttaatacagatggggtttcaccatcttggccaggctggtctcgaactcctgacctcaggtgatctgcccgcctcaacctcccaaagtgctgggattacaggtttgagccactgtgcccagcctattttcagttttttaaaaatgataaccatcctagttgtgtgaagtggtctctccctgtgggtttttttttttaattaataattttaaaaaataacttttattgagaccccaccaggtgcaaaacctgttcctggcgttaagctccttcttcctttgcaattcggtctttctcgagtggtcccatgaatgctttcttctcctccatggtctggaagcggccatagccaaacttggaggtggtgtcagtgaacttaaggtcagtcttctccagagcccatcgtctggtctgcaccagcaaagatgtgcagagaatgagcactcgcttcttggttcccaccacacagcctttcagcataacagagttattggtcacttcaccatagtggacaaagccacccagaaggtcgatgctcttgtcagacaggtcatagtccgtggaggcattgttcttgatcggtttgctgtcctcagtaaggtagccctggtcaatcttacagatcttcttgttgatctcagtgtggtgatggtcgcctttctgcccagcacatgccatggagaaggccacatggtcaggatgccatgccccaatccaggccaccttgcacaggcctcggtgggtcttgtggggcagcttcttggtgtgccaacaactggtgacccctttgtagcctttgcccttggtcaccccgatgatgtcgatcatctcgtccagcccaaacgcttggttcacaggtacctgctgctgtagcccctcctgggctcagtccagcttctcagccatggtgcctccgttcacttggatctccatcagctgggccttcttctggcgcagaggaagtaggcgcgtctgggtgtgggcagcgaggcgggtgacttggcagtgcttcctcatgctgctgaagtcttctccagctgcttcttgccatcctcatcctgccatttcttgcagtacttggtaaaggccttcttcctagatttatgccggttgttagagaaacaccttttgcactcatcgttgatgtgctcagcaaagatggccttgaaggtccggaggcctcaaggggtttccacgtagcccgcaatgcccacaaccaccataggtggtgtctccacagtagtcatggcctctaccacctccttcactttcaccttggatcttggcctgtcgacttcccgtgtgatgtgggtcatgccagccttgtatcccaggaaggctgtgacgttgaccagcttggaagggtcatccttagggaagctcttcaccttcccacgttgcctatttcttcgctcctatggcaggaagcagagggacccatgtctgggagtggagaactttctgtgagacatcacacaatcaaattccaccggtagagctctccctgtggttttgatttgcatttccctaatgactaataattttgagcaccttttcatatgctttttgggcatttgtgtatctttttggaagaaatttctattctaggcctggcgcggtggctcatgcctgtaatcccagcactctgggaggccgaggccggcagatcatgaggtcaaaagatggagaccaccctggccaacatggtgaaaccccatctctactaaaaatacagaaattagctgggcatggtggcatgcacttgtagtcccagctacccaggaggctgaggcaggagaattgcttgaacccgggaggcagaggttgcagtgagctgagatcgtgccactgcactctagcctgggtgacagagtgagactctgtctaaataaataaataaatatatatatataaaattattatttatttatttataattatccagccgtggtagtgcttgcttgtcctcccagctacttaggaggctgaagtaggaggatcgcttgagcccaggagatcaaggctgcagtgagcatgatcatgccactacgctgcagcacgtagtgctgagtgacagaacaaaaccctgtttcaaaaaaaaaaaaaaagacataactttgttagagttgttacctgaggattcccatcccaagggtctcctcttggatctcatttcttgttccctgctgctgtgattaactgttgagtttaagcagccaccttgaagaatttgcaagatacggttgggacaaaggtgatgctgtcagtccctacctctgctttgcctgaggccgctgacattcatggagagctcactgcgtgctaaggagttgacgtgcattattgtataatacttaaaatgtatcttgagatccgtctcaggttcaaccacttgtgcaaggccactgccagccagtggcagagagagggctcagaccccgaccagcctggttccaaggcccatgctcatgagcagagcctccagccttcttcatgtcagtatctgtatagcttacgtaaggggaaagggctgtgcttctttgctgccagggaccctgtctccatcacccaaatgcagtaggcgcaattattaggcccattttaccgatgaaggctaacctacttgcccagtgtcttatggcaactgagtggttattatggattgaattttggcctccgtgaaagaaaccctggagtcttaacccttagtacctcagtatgtaacttgatttggaaacagcatctttacagagctaatcgagctagaggaggtcattagggggtggccctaatccagtgtgactggtgtcctgatgaaaaaggggaaatgtagacacagacatgcatgagggaaggcaccatgtgaggatgaaggcagagaccagaaagatgcatctacaagccaagaagtgccaaagaatgacagcaaactcctagcagcggggggagaggcacgggacagattgtctatgcagccttcagaagaaagccgctctcttgacaccttgatttcagacttaacatgagagaatacatttctgttgttgaagccacctggtgtgtggcacttcgttatagcagccctagaatgctatgacagtggtaggacaagatctgttaacacctcagtgctggggataaggcattgaacactaagcccctgctctcatggaaagaaatgacgctttcttggcgagagacagacgacagatgactgtgtgatgtcagatgctgaatgctaagaagaaaaataaactggggaagtggggtatggaggaaggaggagggagtgctattttagacagagaggacactgacagcgtgaccttaaagcagaggttggggtgaagtgagcaagctggtgggaagggcaatctggggcatgggcctgtgtccaaggcatgggaaggggacaggagtagccagaggacagagtgaccagagatacagcagggtcaggccactgataggattttgctctggcggggaggggaagccactgagcttcctcccagggaggctgtgagcaagggaacctctgcctcacccattccaagaattccccgggccgtcagcaagcacaagagccagtgtggatgcccgcaccattaggcctgagatcagttcctgccgttactggatgtggagggtttggatggtgctggagggagcacatcttgatcagcatcaggaatacttggttctgtgaaacttgcaacttctgcattcaagggtccctgataggagttggtatgaataaagaattttcttcactgggtgcagtgatgcatgcctgtaatcctagcactttgggaggctgaaggcagaaggatcacttgagcccaggagtttcagaccagcttgggcaacatggcaaaaccttgtctctccaaaactacaaaaattatctggccatggtggtgcacacctgtagtccagctactcagaagcctgaggtgggaggatccctggagcctcagcctggagctcttgcaccactgcactccatcctgggtgacagagtgagaccctggctcaaaaaaaaaaaggaatttttttaaggctttggtgatcgtcacatttcttggacttatgcacagaaattcagtgagtaagagttgagagttgggcggggcgcagtagctcacccctgtaatcccagcactttgggaggctgaggcaggtggataacctgaggtcaggagtttgagtccagcctggccaacatggtgaaaccctgtctctattaaaaataaaaaaaattagccaggcatcgtggcgaatgcctgtagtcccagctacttgggaggctgaggcaggagaatcgcttgaacctgggaggcagaggttgcagtgagccaagattgcaccactgcactccagccttggggacagaggaagactctgtctcaaaaaagagttgagagttgaattagcaaaattctttataatacagatttaaacaatgatataggacacaaaagcttagggtcaacattcttttttttaaggtaggtaactaaatgttataatgcataaaacttagatttggaggagaagactcatccagtcaacccttttttcaactaagaaaactggttcccagaaggtcttggtatgtccagctgtagacagattctaatggtatcattttcaaacttgctcaatgtttcagcatcatttttagaatttttctgtgttagagaatagtttatctttttttttttttttgagatggagtcttgctctgtcgcccaggctggagtgcagcggccccgtcttggctcactgcaagcttcgcctcctgggttcaagcaatcctcctgcctcagcctcccgagtagctgggactacaggcgcccaccaccacacccggctaattttttttgtatttttagtagagacggggtttcaccgtgttagccaggatagtctcgatctcctgacctcatgattcatccgcctcggcctcccaaagtgctgggattacaggcgtgagccgccgcgcccggcccaagaaaaacattttcatcaagtgcccttttgagccctgaacccaggtgctctaccaagcctgatttacagctttgattttggaagtgaaggctaatagaaataaattaactctggatttaaaaatcttatcattaaagctctttaaaaaaaaaaaaaagttataatggtcctaaatgaaccagttttttttgttttttgttttttcgctgcttttatctgatgacacactacggtttcacagagcagccatgaacaggaagggcagcatgaggtctgtggtgtcacacagttcagcttccggagtcttcatcagttagctacaagcacctcctgtttaaagcagagcctcctgatggtgtgtttcagaattagtgctgcagtgtggtgggaagaacacgggttggagcttggagacctagtgaactactccagccctttacagatcggctgcaagaactctttacctaaaaacttggtgagaggccaggcgtggtggctcacgtgtgtagtcccagcactttgggaggccaaggtgggtggattacttgaggtcaggagtttgagaccagccttgctgacatggcgaaaccccgtctctactaaaaatgcaaaaattagccgggcgtgatggcaggcacctgtaatcccagctacttgggagactgaggcaagagaatttctggaacctgggtggcggaggttgcagtgagccgagattgcaccactgcactccagcactccagcctgggtaaccaaaaaccaaaataataaataaattaataaaaacttgggtgagtccaacagaatccttcttctttttttgaggctggagtgcaatggcatgatctcagtttactgcaacctctgcctcctgggctcaggccatcctcctgcctcagcctcccaagtagctgagactacaggcatgtgtgcgctaccatgcctggctaatttttgtattttcttttcatagagacagggtttcactatgttgcccaggcaggtctcaaattcctgagctcgagtgatcctcacaaagtgctggaattataggcgtgagccaccgtgcctggccgggatcctgattttttacccctgcctgaatcaactcctcttccctgttgactagtattagttcacataaatcctcttcagcctggagtctgtgttagtctgctagggctgccataacaaaataccactggcagagtggattaaacaacagattgttttgtttcacagttctggaagccagaagtccaatatcaacgtgtcggcagggttggttcttctgaggcctcgctgcctggcttggagatggtgtcttctccctgggtcctcacaggatcatccctctgggtgtatctgtatccagatttcttcttcttcttcttttttttttttgagatggagtctcactttgttgcccaggctggagtgcagtagcacgatcttggctcactgcaaccttcacctcccagattcaagcgattcttctgcctcagcctccaaagtagctgggattacaggtgcctgccaccacagccagctaatttttgtatttttagtagagatgtggtttcaccatgttggccaggctggtctcgaactcctgaccttaagtgatccgcccgcctcggcctcccaaagtgctgggattacaggcgtgagccaccacgcctggcccagatttcctcttcttacaaggacaccagtcagactgcattagggctcaccctaactgcttcattctactttgattacctatttaaaaatcctgtctccggccgggtatggtggctcatgcttgtaatcccttggcctatgggaggccaagatgggtggatcacttgaggtcaggagttcaagaccagcctggccaacatggtgaaatcctgtttctattgaaaatataaaaacgagctgggtatggtggcgcatgcctgtaatcccagctactcaggaggctgaggcaggagaatcacttgaacccagaaggtggaggatgcaatgaaccaagatggcactgctgttctctagcctgggcaacagagtgagactctgtctcaaaaaaaagaaagaaaagaaaaagaaaaagaacctgtctctaaatacagtcccagtctcaggtggaggtcaggaagggctttgccataggagtttgagagggatacagttcagccatgacagaatgtgatgaggaggtgcaggctgtctctccacctgtcacctgtttacaaagctgatctctggtagaagcccagatggtcttttatcacacaccttgtggaggaacagaggaagtgtgatttctttagtcttgttcttgatccaggagcccagtgaggagcttcgactttggggtgtgtgtgcgtgtgtgtgtgtgtgtgtgtgtgtggtgatacagttaagcacccagaactgctgagtcaggaaagcgttccaggtgatttgtgccccctccaccgcatgccaagagctctgcaccagcttatttatggggcactgcattgtgggggtatcctacatgtctgctgggggtggccctttcagccttcctcccccactggagccttggtgctgctgccacagttgactctgcactccttatccctgctggccagaccctgcatgctcggtgcctagaacaaggctacgagccctgccagcctccttgtgtatgagctgcatctttcagcctgcagggtgcctggtttcatctcagcatctcacttgtagggcatcctctgttagagcgtgacacctaaatttggggctatgattttagccattttctagcaacctttgttctgatgacctctgtggctatgaccgtgagggtggaggtggccaggtaagtgcagggccagggtcatcgtggaatgataagggcctgaattgccttctgagaagacaccaaatggaaaggatgctgttgatgggaattcttgactggcttcacgttaaactagatcctgtacctctgcaggagaggggccagcccagcatccatttgtctctggcagtgtcctgatgctcttggcaccagtatttagaagatgcagatccaactcccgtttttttccctcccctcccctttcttttcttttttgagacagagtctcactctgtcacccaggctggagtgcagtgacccaatcttggctcactacaacctccacctcccaggttcaagtgattctcctgccccaggctcctgagtagctgggatcacaggcatgcgccaccacacctggctaattttttttgtattttttgtagagacagggtttcgccagactggtcttgaactcctgacctcaggtgatccgcctgcctcgacctcccaaagtgctgggattacaggcgtgagccaccgtgcccagtcctaactcccatttctaaggtgtggcaaaggctgctgaatcctttgctgtcgttctgttgtgggtgccatgctggggctctgatgatgttgcagcttcaccccttaccccaggttatctgaaggagctgagggtgttcaagagcactgctaccccaggcttcacagcagcctcagtgagggccactcacactgtaagatcgagatggtctttttgaaaagagcatttctctttgctgaaaagagtctgatatgcttttcgataatttgtagccaggatagtctatttactttgtgtttgagtgaaggaatatttttgccattcttcctttcaggtctgctgtggggctggaggtagtccagatttagagatgaattattcctccagtgctgtgatttgaatggctcttccaaagtccatgctgaaacttaaccccaatttgacaatattggggttgggggggcctttaaaaggtgaccagaccatgagggctctgttctcataaatgagttactcgacgtatggattaatgcattgataggttatcctgggtgaggaactggtagctaaataagaagaggaagagaggcctgagctagcattagcatgctcggcctccttgccatgtgatatcccacaccacttcgggactctgcagagagtctccaccagcaagaaggccctcaccagatgcagccccttgagcttggcctctgtaactgtaaaaagtaaatttattttctttataaatgacccagtttcaggtattctgttataagcaacagaaaatagactaaaatatccagcaatctaacagaattgagtttatagataagggaaagggtttgtgacccacctacactatataaattctcccaagaaagttaggagctagaaactccatgtcacgccttggtgtggaaggtgctgtggactgaattgtgtttctccttctcccctcaaactcatatgctgaagtcttaaccccagtgtagctgtatatcaaggtaggatctttggcagatggtttaggttaaatgaggtcatgaggatgagaccctaatttaataggactgtggccttataagaataggaggagggcaggcacagtggctcacacttgtactctcaggactttgggaggctaaggcaggtggatcacttgagcccaggagtttgagaccagcctggacaacatggggaaaccccatctctacaaaaacaaacgaacaaacaaaattagcctggtgtggtagcatgcacctgtagtctcagctacttgggaggctgaggtgggaggtttgcttgagtccaggagtctcttaagaaaaaaaaaaaaaggaagaggaagagacagacttcctcccacctcccaccatgtgaggacacagtgaggagatggctgtctgcaagccaggaagagagctgaaactgctggcaccttgattgcggactcccaacctacagaactgggagaagtaaatttctgttgtttaagccgcccactctgtggtattttgttatggcagcctgggccaactaatacagaaggaactaagttaaacttgtatttttcagaaaaaaagcaactgtttgaacaggaataccaacattcaagcttgtatttgagtcacatacaggcattcccatttacctatcttttaaaaatagtcttttccttttaaatttctttccaactttattgggcatacaataaactgcaagcatttagaagtgtataatttaaagagttttgacataacgtttatccctgtgaaaccatcaccacaatcaagacaatgagcatggatctgtcacccccagaagtttcctcctgtccttttgtcgtctccctccctcccttgtccccagacaaccactgatctgttttctgtcaccatagatttgtttgcattttctgaaagtttatataaatggaatcccacagtatgtgccgtctctctccttttctggtctggcttctttcactcagcaaagctacttcgagagtcattcaggctgttgtgtacatcaaagtttccttcttttttactgctgagtaagagtccatggatatatacaatttctttatccatttcccattagtggacatttgggttgcttccagtaggtatatgtttaattttttaagaagctgccaaactgtttgccaaagtggttgtatcattttacattcccagctgcagtgtatgaaagctccagttctcccccatcctcttcaacacttggtatggtcagtctttttcactttggtcattttaatgagagtgtaatactctcttattgtggcttttgcattttgtacatgacagatgattagaaaatcagtaagtggtcattgtaactttgttttaattccatagacacataacataaagatcactgtaagaatcttcactgttttattgtatgtaatagcaaaaaattgggagtgaccacccctggtaggggagtagttgtgaagtgagtcatggaacgacaatataatgcacacacagccatggaaccaagtagactggtagttactaacatgaaaaatgcttattataaataagggggaagaaaggacaggcgaacagtttacatatagcccactcaatcttgtgtgtgtgtgagagaaagggagggggtactgtataggagtggacaagatctcgaagccccttattgtaggactagtgtatttccagtttttcacgactctgaataaagctgtaatgaacatctttacgcacgtggctatttttgttaagataaattgctagaggtggagtagctgggtcagtggacgtacagtgaagcctctggacacaggggtatgtgctggcctgcctttgcccctctcctctgcctgcacagatgccagagccacagcctgtcacctgctgtactttgtcatgtgtttatctagcaggaccacattctctatcccaatcttgtcactcttctgattccagaatttctccactattcccatgttgggaacattaggataatttataaagttaaaaaaaaactagagggggttattgatattaaccattataggtaataacaatttagattattctgggaagaagtgacatctttacacacttgggcccttccatatagaaatgtggtagtttccatcattcattaaaatgtactcactttgctggccgcggtggctcatgcctgtaatcccagggctttgggaggctgaggcaggcagatcacctgaggtcaggagttcaagaccagcctggccaacatggtgaaacctcatctttaccaaaaatacaaaaaattagctgggtgtggtggcgcacacctgttagtcctagctacttgggaggctgaggcaggagaatcacttgaacccaggaggcagaggtcacagtgagctgagatcaggcctgggcaatagacggcgctccagcctgggcaagagtgaaactcggtctcaaaaaaagaaaaaaaattgtggctgggcacagtggctcatgcctgtaatcccagcatactgggaggccgaggcggggggatcacctgaggtcaggagttcgagaccagcctggccaacatggcaaaaccccatctctactaaaaatacaaaaaatagctgggcatagtggcgtgcacctgtaatcccagctacttgagagactgaggcatgagaatcgcttgaacccatgaggcggaggttgcaatgagccgagattatgccactgcattccagcctgggttgtcagacagagtgagactgtgtctcaaaaaaaaaaaaaagtattcacttatgtccttaagagttcttcttaaataagaccttcctgttcctcaagtatattaagtattttatacatgtgtttttgctattgtgaatgggattattttcctcaggtagacaggtataccgtcaaccaatactgatttgtatttttttctaatattttgctagcatttcctggaacagtgttgaatagcaatgttgctatcagtgtgttaaccacggtaatgttggctgctataacaaagaagtccaaaatcaatgtcctcgatgtaattgaagtttatcctcactcatgtatcagttaagcatgttattcagatgggtgggcagctctcttctacacggtcattccagaaactcaagctaggactctgtcttcttttttttttttttgagacagtgtcttgctctgtcagtcaggctagagtgcagtggcacgatcttggctcactgcaacctccgtctcccaggctcaagcaattctcctgcctcagcctcccgagtagctgggattacaggcgtgtgccaccacgcccggctaatttttgtatttttagtagagacggggtttcaccatgttgaccaggctggtcatgaactcctgacctcatgtgatccacccccctcagcctcccaaagtgctgggattacaggcatgagccaccacgcccggcccaggactcttgtcttcttgaacacgtggctttcacagttcctcttttcattgccattctgtcccacaggaaaagggaaggacacagagaagcacacatactgaggttttaaccagccaggtcctgatggcacgtgttatgtccacccatgcctcccagggagactgggcagccatggcccagctgcagccctaactgaagaagaagggagccgtgatttgggtgggctgggcccagtgcctgcactcacctggcacgatttaatggaagggtctgtagtgtttcaccatcatctctaccctgtgacctccctctgtttcttgtgtcataaaggatcagtttattccttggttactaactttaataactacttatctttatatggcaagaaaggcatgtcatttcattacctgatcaacatgtaaagtattgaattgctttttaccaagcatcacagttctgccttatgtattactcttgtgtttgggggtcattcttgtacttaggctagattttcccaatgcctaggatgtgcctgggaagcaaatatgttggaggataatctaattccgatttgtggaatgcaggaaggagcccggaattggagcacctggggtcatgttcagactcaccatttctgagattggggcagatgcactggttacccaccgataaccattctgccctcttctttcttgccaatagagaaccccagttatatttggggatcaggtggtgatgcgctgcagggtgggggccccagcagtaaatgttattgttctaggacttcatcctaaaaatcctgctttccttggcagggattaatttcgaggtgggcacatgacctgctctagcccaatgagatatggcgggaaggctgcagggtggcttctggaaaggtttttttctcatacaaagagacaaaaaggaacacacactgccacgacagggaaagataggttaagagtcaattcactggcagggcgtgctggttcacatctataatcccagcacttggctgaggcgggaggacagcttgaggccaggagtttgagaccagcctgagcaacatagccagaccccatctctacaaaaaaagttaaagttagccaggtgtgacggtgtgtacctgtggtcccagctagttgggaggttgaggcaggagaattgcttgagcccacaaggttgaggccacagtgagccatgtttgcacaactgtcctctagcctgggcaacagagcaagaccttgtctaaaaaagaagagtcaattcatcattgacagcatgtaaggcaccagaatgcttggatcttttggggatgtcactgagcccttgcaggaaccaaatgcagaaatgagctcctttagccctggtttcccagccttggcatgctgtggcatggcagacattctggctgcgggtgggtggtggtctgtgcactgtaggatgttttcttttgtttaagaggcagggtctcactatgttgcccaggccagagtgcaggagctgtttacagatgcagtcatagctcactacagcctcacacaatcctctcgccttcgcctcctgagtagctgggatcacaggtgcgcgccactgtgcccagctctctgtaggatgcttattcccatcctggcctccctgacttctgtccagtagatgccagtatcaccccctcctccacccaaagttgtaacagccagaaatgtttccacacattgccaaatgtcccctgggggcaaaatttccccagttgagaaccactgctgtagacctttggttttgtgaggcaatacattgcttcatttaaacctgtatggcttgatggtctgttctttacagccacacatgtcctagctgagctcacaaccctggaccatcctcaacccgagagccagagcctgtttcttctgcaggctgacgtggacgtacttgtctgttgacagtaaaggtattttgtgcatccttaaaagatgcagtgtcttgcagctgttggagtggtttctggctgggagcaggacgcctacagagcagttgcagaggaccttctgtctccccatggcggaggcaccattccaactacggaacctttgttgtgttttggagggggtcgtgtgcttccagcacctgccgcctctgccagccacagcactctgcctctttgttctgagtgcccgggacagagttgtatagctgctgccttttggagagaggagtcagctttgggcttgaatgtatctggagatagcccagctttcatgccatcttcacatttcctgtgtacatggtttcttttttttttttttttagatggcgtctcactctgtcgcccaggctggagtgcagtggtgcagtctcaactcactgcaacctctgcctcccaggttcaagctattctcctgcctcagcttcccgagtagctgggactacaggtgcgtgccaccacgcctggttaatttttgttttttgctttttctattttatctttttttgagacagagtcatactctgtcgtccaggctggagtgcagtggcgtgatcttggctcactgcaacctccggctcccaggttcaagtgattctcctgcctcagcctcccaagtagctgggattacagatgtgcaccaccacacctggctaatttttgtatttttattagagatgggatttcaccatgttggtcaggctggtctcaaactcccgacctcaggtgatccacctgccttggtctcccagagtgctgcgattacaggtgtgagccaccacgcccggcctaatttttgtatttttagtagaggcgggtttcgctatgttgcccaggctggtcttgaactcctgacctcaagtgatccacccacctcggcctcccagagtgctgggatcataggcatgagccaccgtgcccagcccctgtatacactgttgcggccccttcccacccagctgccgagagatggttctttcacaggtctcctgcttccgtgcaggtagcttattccagggacagggaagcaggaggaaaaagcactaggaggaagaccgcagactggattcagaacaggctatcgtggagagctgtgtgcttcgctgccggcctgaggctctgcgttcccctccttggtgctcaggctgcccagcatacgcagcaagtgctgacccagcaggcagcccacgtgcgcttcaggtgtgggaggctctgcgggctgcggggaacaggatcgctgtgggaggttgagcctggagctctgaacagccactctgcgcccaatctgctgtagcgctgagggtcaggaaggcctctgggagttctctagaagaaggcgctggggaggaggagttaacatctcatttcattagagcatgccagttctgttctgggtgtgacttttgaagaatattgagttctaccagtagaactttggggactgaaacctgttgaggatttgtagtaagactgtgtcccgaaggcgttcttccttttcttctgtctctgactttaacaagcaggtttccctataagctttggtgtttgttaaacagatcatttgtatgtgcaataaaatatgtttaaaaattagaaaaataacatctcccgatactatgttattttatatttttaatggtatgattacttttatttgattttctggtttgtgatgataaatgcataagaatggcagtgttctctgcatcatgtacatttcaaggtgtagactgtgttctgaagggagagtcggccccacatccttaccttcttttcctgtggtttattgcagaactcagctgccttcacctcctcctgccatttttcatcacttctgagactgttagctcttagaccccccaaatagaacagtttcctttgtgagcccctattatatgcttgccaccattgtttttcaaacctaggatcctccaaactcagtgccactcagcctcttctactgatgaagaaactggagttcaaaggcttgcttgcagcttcccaggtgtatgacgagtatttcaggtcggccagcgccttgtgaagcccacactccagggttgagggcaacatgtaacaatgtcagggaaggctgaggaagtgctgtgccatcgcaaaagaataaaatataagtctagaaatgcggaaggtactgtacagcatcacagctacctaaacttcctctatgggaagacagggaaagtaggcgttagtggcaagacagagtggctttgagtctaagtgtcataataaactctgacggggaaaaataaggggcagcatttgcacatgtgtgctgcagattacccgctgtgaggcagcggtgagtttgttgccttgtgttttaaaaagtaattttctgggccgggcgtggtggctcacacctgtaatcccagcactttgggtggccaaggcaggtggatcacttgaggtcaggagtttgagaccagcctggccaacgtggtgaaaccttgtttctactaaaaatacaaaaattagctgggcgtggtggtgggcgcctgtaatcccagctacttgggaggctgaggcatgagaatttcttgaacccaggaggcagaggttgcagtgagctaagattgcgccactgcactccagcctgggcaacagaacgagacttcgtctcacaaaaaaaaaaagaagtaattttctgatctagcatgtggattcttgagtcatcttaactaagagattgggagcagcctgtgtggctgacaggccctattgctcatgacttgtgtatgtgtacacgtgtgggatgtgtgtatgcatgtgtgtatatgtatgcagtgtgtatgtgtggagtgtgtgcatgtgtgtacatgtatgcatgtgtagagggtgtgtgtgtgtatatgtatgggaagtatgtatgtatgtatttgtgtgcctgcatgtgtggacatgtgtacgcatatccagtgttaaccctgacacactggggaagtggaaatagaatgaataccctgtatgtttcagctcctttttgagtttatcctgcacgaccagcttatgagtaggtgatggtatatttttggtcacctacagcacttcctcagcctcccctgacatgtctacatgttccacccccacccccggagtgtgggctttgcagggcgctggcggacctgaaatactctgcacacctgggaagctgcaggcagacctctgagctccagctcgttcttcagtaaaaggggctgaatggtgctgactttggaggattccaggtttcagaaataatgggtgagaaagcagagcctcagagctatcaggtgacttgtgacaggcttgctcagatgagagctggagcccggactcggacccaggcctgccactcagagcctggcctctgtcacagttcccctcccattgactttcggggcccgtcttaggagctcgaccggcggccagcaaaacattccctccacagcagagccacctctgggtaaactgataaaaatgagcttctgaacctgccaaggtgccagggctcaggccttggcttcagcaatgtcattcccccagcagacggtgagtgggtgccagccacagtcaagcacccactgtgctcttcccccaaggcctggcctgggttagctggctgtcctgcccctcccctcccctcccttcccctcctctcccctcccttcccgggggagggtgcttgactgtggccagcgcccattcatcgtctgtggggagaatgacattgctgaagccaaggcctggctttcgacaagagttttgctctgttgcccaggctggagtgcagtggcaccatctcagctcactgcaacctccgcctcccaggttcaagtgattctcctgcctgagcctcctgagtagctaggattacaggagaccactaccacatctggctaatttttgtttttttttagtagagatggggtttcactatgttggctaggctggtcttgaactcccaacctcaggtgatccgccttcctttgcctcccaaagtgctgggattataggcataagccactgtgcccagcctatttattttattttttattttatttttgagacagggtctcactttgttgcccaggctggagtgcagaggtgcgatcgtagctcgcccacagccttgacctcctagttccaagtgatcctcctgcctcagcctcccaagtagctgggactacaggtgcacatcacatgcccagctaatttttgtattttttatagagacagggttttgccatgttgctggtcttgaactcctgggctgaagcaattcacctgcctcggcctcccaaagtgctgggattacaggtgtaagccactgcgcctggcctgcttcttttttttctgagcatgcttttaaaatctctagtaggtgatacacccagccttcagttctactcctactcaagcagcatggtaattttaagaaaattttaaaaggaaaaaaaaagcatattctaatgtgtcttcttacctgatgcagaagatggagttagcctgagtgacccattccttgctagcagctttattggaagctgggatttgggtatgtggataactcatgctgagagctgattaatcacgtgcatggccctgttagggttcaactgacttaggtaaatacaacacaatgatatttcagctgtgacctttcagagaaggaagctccttgtttacataggagttatagcagcactgctctcccagttcaacaaaaactggtctcactggttacctgtggaaccccgactccctgagatggctctcggcagccttgccttctgcctgtttctccagcttatctcttgccaccgccactccctcaagctggcaaagcaaccgggtcatgccatttcagtcaaggtggaatgccacaccatgagcacttgggaagtcctggccaagtgctggtctgttccattttcgtcctgtctaaagggcactaacagtgccccctggcaggtgcttcactgagcgtttgagcctgtgtcacctggcctccctgactcactgtgccactgtgcagcttcctttcagtggcatgaaaagaacacccttacaaagatgcctgacttccagaaggaagacatgtcagtgtttcaccgtgaaaaatgcaactcctcgtttgcttggtgggagacgtgcttttaaattggctgacttacatttctttctagacaaagacatctggcattctgaagtcagcattgtactctgtgcaaaagtagggtgactgtctcttctaggaacttttaaaggaaacatttaacatttttattttacgggctaaataaagcgttttaaaaatgaaacataattctgtccactccccacccatatggttaaattactccttttttaaagcattttaaattgtggtaaaatacatataaacaaattgtggtaaaatacatataacataaaatttaccatcttaaccatttttaagcatattaacttgtgtccatgtgtagccttttggaatttttcatcgtgttccctacacagaatgcttctaaatcatgccgtgtcctggggactgtcatactgtcaggttgtgtaaagtcaaaggaaacaaagatattttcttgggtggagcaacagtgacacttcctgatttctattaagcttggatgtagtttgaatctttttttttcaaacatactttatacttaacattttagtattttcttttaaggtcagcctactgagcctatgcatataatgaggtcaaaaatgttacaattatgtcctaattatagctcaaggaatgcttttagaacagtgtagttcctgagtgaaataaataagaaagtttaatttcctgtttaatcagtttctcctttttaaatttttttagcactttaaaaagtgattttgaaggctgggtgcagtggcttacacctgtaatcccagcactttgggaggccaagacggtggatcacaaggtcaggagttcgagaccggcctggccaatatggtgaaaccccgtagctgggcgtgctggtgcacgcctgtagtcccagctactctggaggctgaggcagcagaatcgctagaacccgggaggtggaggttgcagtgagctgagatcacaccactacactccagcctgggtgacagagcgagactctgtctcaaaaaaaaatgggattttgggttaggcacagtggctcacgcctgtaatcccagcactttgggaggctgagacaggtggatcacgaggtcaggagtttgagaccagcctgaccagtatggtgaaaccctgtctctactaaaaaatacaaaagttagctgggcgtggtggcatgcacctgtagtcccagctacctgggagactgaggcaggagaatcgctggaacctgggaagtggaggttgcagtgagccaagatcacactactgcactccaacctgggtgacagagcgatactccgtctcaaaaaaaaaaaaaaaaaatgattttcagctgggcacagtggcttacacctgtaatcccagcactttgggaggctgaggcaggcagattgcctgaggtcaggaattcgagaccagcctggccaaaatggtgaaaccccgtctctaataaaaatacaaaaaataaaaattagccaggcatggtggcacatgcctgtaatctcagccactcaggaggctgaggcaggagaatcacttgaacccaggaggcggaggttgcagtgagccgagattgcaccactgcactccagtgttgggggacagagtgagactctgtctctaaataaataaattaattaaattaaaagtgattttgaaaacatggccatttttcctggccagttcatctctttcttttttttttcttttcgagatggagtctcgctctctcactcaggctggagtgcagtggcgcaatctcagctcactgcaacctctgcctcccgggttcaagtgatcctcccacctcagtctcccaagtatctgggattacaggcctgtgctactacgcctggctaatttttgtatttttagtagggacagggtttcgccatgttgcccaggctgatatcaaactcctgacctcaagcgatctacctgcctcggcctcctaaagtgtgggattacaggcgtgagccattgtgccccacctcagttcatctatttctctgtgatatttattctatagttgcagaagaatatttctcatatgatacgtatattaagcttactggccagccagtttgggtttctggatagtgaaactgtcctggaagtgtttgctgagcttttcttgctggagaagattcttggcaaagcctggatggaggatggagatgagaaaggtagtgtgagggtggcacacctgttttgtgctaattccagtcttggcagccctggacctgccgggagagggatgacagtgacatgtggcccagtttttgctcagagaaggaaaagtcaccaagaccgaccatgagggcaggagctcttgcttctcctcctagatgagagttagaaggaatttgagagcaaggcttctttcttgggatccaaatacttcttaccttggagttttcctagccgtggctagtgggtcataatgtcagcgacattgccaaatgggagcggaagagtgtcgttgggggaagggtgaagacgctgtcagagaataagacataccccactagaactttaaaaaacaagtcagaaaaaaaaaaaaacaaaaaacagaaaaaaacccacatacccacacatacaccctgaagagggaatcaggagtttgcaagccctagaaggtagttattgtggtaattaaagattgaaagctcactctcaagagagctgcaccaaatccctgggctgcctcagggtttgctgaaatgagtcccactcttctctggtcagttcagtccaggaggggctggcgtgcaagtgtcactcaagaattcatggctaggctgggcgaggtggctcacgcctgtaatcccaacactttgggaggccaaggcaggtgaatcacttgaggtcaggagttcgagaccaatctggccaacatagtgaaacctcgtctctactaaaaatacaaaaattagccgggcatggtggcacgtgcctgtaatcctggctacttgggaggcggaggcaggagaattgcttgaacccggaaggcggaggttgcagtgagccgagatcacaccactgcactccagcctggcaacagagtaagactctgtctcaaaaaaaaaaaaaaagtttatggctcttacagccttagccagcaagagcaattgccatgaaacagcattatttcttttctctttatgctattgtggtaaaatacacatggcctaaagttgaccattctaaccatttttaagggcacagttcagtggtattaagtacattcatattgtgtatcctgccatccatctccagaaccttttcatcctcccaaacagaaacttccagatggagtcctaccgaattgcccaggctagtctcaaactccttaggataactttcattcttggctgggcatggtggctcatgcctataatctcagcactttgagaggctgaggtgggtggattgcttaagctcaggagtttgagactagcctgggcaacatggcgaaaccccatctctacaaaaaatatagaaatcagccaggcgtggtggtatacgcctgtagttccagctactcgagaagctgaggagggagaattgcctgggcttgggagattgaggctgcagtgagccaagatcacaccactgcactccactgtgggtgacagggcaagacactgtcaaaaaaaaaaaactaccaaaaactaattttcattctttttttttttttttgagacaagagtcgcccaggctggagtacagtggcatgatcacagctcactgcagcctcaacctcctgggctctggtgatcctcccacctcagcctcccaggtagctaggaccatagccatgtgccaccacacccagctaatttctttgtatttttttagtagaggccggtttttgccatgttgcccaggctggtctccaattcctaggctcaagtgatctgtccttcttggcctctcagagtgctgggattacaggtgtgagccactatgcccagccactttcattcttttttttttttgaaatggagtctcactctgttgcccaggctggagtgcagtggcacgatctcggctcactgcaagctccacctcctgggttcacaccattctcctgcctcagcctcccgagtagctgggactacaggcgcccgccaccacgcccggctaattttttgtatttttttagtggagatggggtttcactgtgttagccaggatggtcttgatctcctgacctctgatctgcccaccttggcctcccaaagtgctgggattacaggcatgagccaccatgcccggccccactttcattctttagaacaaggaaattcatactgttttatctaagaaagaagctttcctaagtcctgtacttggacgagggcaccggtgttgtctttgggtacagggcattagcaattgtaaagaacagtgttgaaggggtgaataagtaatatcttttcctcatccattgcgaggttcatggctgagacccctataacgaaagagagattaacgagagaaaagcatgcaaattaagttttacatggcatgagagccttcagaaatgaagacttggagaaacagggattccaatctgtgtctctgtgcttgggtttgatgaagtgtgacagtcgcgtagaatgactggatgcgggctgtgatgattcaggaataccccggggggaatttagcaaggcctgtttgttcaggttcttcttggtgcctctgggagacattccttccctctgggtatagggcaggacgcctgtcacagggcgttcaggggagaagggagggagatcttgatctccctaggctttatgagctgcctaggctttatgagctgccacagggaggaaggtgagagtatccttcctgcttctgctgttttctcagtttcccaggtaccatattttggggtagcatttcctgcaccccattagtatccaccagagaagtttgccctaaaaatgtgctgtccctcttgtgtctggtgctggccttcagtgagactgaagggcatcacggaaaagtctcgtaaggtggaattgcggggagcccgagtgggaacctccatggtggcctttaccactgatccaagcaactggttctcccttctccactgggctacagctctgagcttctgcacaaagagtggagtctccatctttaaatattctgcttatttttcaatttgtcattatactaagaggtcatgtgtgtggattacttactttgtgctgggcagtatgctaaattctttatacatggtaactctttatgcttgtaacttcgtgaggtatcacagtcctcatttttacagatgaaacttcagcccagaaaggtaatttgcccgaacagcaaattctgaaactggaattggtggctctggtgcccaagcttgcatatttagaccaggcatcagtaatagcctcagttttgtttattgctttgttaagccttagttttgaagcacttgttaagtgcgaggctccatgtagagtgtataaacactcaatctctgtgtgacgacagctccaaggagcagtccagcaagttctgtctggccaaatctagacctggttttgattaactttgttcatgatctctagatcactctgctctatgcttgaacctgtatgcttgagtcaagcttacctctctgatgggtgaagaaaatgatatttcactgttatattaattttatttttcttaccacaaaggaaggatatctcttcatttttctaagtcctgttggttcattgcctttgcttttgctgcatttctctctctctctctttttttttttttttttgagacagagtctcactctgtcactcaggctggagttcagtggcacaatctcgactctctccaacctccacctcccaggttccagtgattctcctgcctcagcctcctgagtagctgggactgcaggcgtgtgccaccacgcctggctaatttttgtatttttagtagagacagggtttcatcatgttggccaggctggtctcaaactcctgacctcaggcgatctgcccatcttggcctcccaaagtgctgagattacaggcgtgagccactgcacccagccttcttgctgcatttttaaagaagacaactgcagcttgtctctcttgataagcagtctgagtttgcctttagtgcaccttttcttcaacagaaatcagttgcctgtctcagatgggccttgctcacattattcacatgggctgggtacagtggctgacacctgtaatcccagcactttgggaggccagtgcaggtggatcaattgagcccaggggttcgaggccagcctgagcaacatggcaaaatcccatctctacgaaaaaataccaaagatgctgggcatgatggctcatgcctgtaatcccagcactttgggaggccaaggcaggtagatcacttgtggccaggagttcaagaccatcctggccaatgtggctcaacttgtctctactaaaaaatacaaaaattagccaggtgtggtggcacatgcctgtaatcccagctacttgggaggctgaggtgggagaatcacttgaacctgggaggtggaggttgcagtgagctgagattgcaccactgcactccagccttggtgacagaacaagactctggctcaaaaaaaaaaaaaaatccccccaaaacaaaaaaaaaatcagcagggtgtggtggtgcacgcctataaccctggctactcaggagactgaggtgggaggattgcttaagcctgggagttagaggttgcagtgagttgcaatcacaccactgcattccagtctgggtgacagagtgagaccctgtctcaaaaaatcaaaacatgataaacatggtcaacatacagtgaacaagttcattccacttttactggttacagcctcagttctgggctatgtgtctttttctatgtctttttcacattaaatgaagtgaggtaacacatgtaaatgagaaaaaatagcaatcagttctattaatttgaaatgagtggttgtggttccttgcaattgcgttcatatgaaaagagatctatcagtcaggatagggaaagttatgcacagtaacaaacaatcctcaaatcatggtgacttttacaacatggtttatttctgccttactggatcagaaagtagtttctgctttctgaaatttctcaggggctttatctcaacctgtgtttccataatcttagaggcagggaaaagagaagtgataagctatgagttggctttgaagatctgtgccagaagtgactcccataattctattcatcttgttggccccaagtatgtcacgttgccgtgcctatactcaaaagagcagaagaaagggatcctgctgtgtgcacagactgagggaacctcttaggaatcccagatgctccccatgggaagtacttaacatcttttttgtcccaaatagcagaagtcttagagtataatgagcaaaaatgagatttggtagtgttaaaaagagaaaactctgccttgacaaaaataatggtacaggtcaagacagcttttagctctcctgctcttgaatccatggagaaagcttgttagcctgtgatcagtaagccatgggagtcgtggaaatgttttctgcgggctggctgggcattgctggtggtgaagctggatgttggctgcctgaccgttctatgtgtttgaaattgcccatgagcaaatgtactgtttgctatccattatccacgttcattccttctctgctgctaccgtcagtctgttttcatcctttgtgacagtgtggaagttaagtggcctctcctctgttctttttttttttttcctttttggaacataagcacattttttcacattattttattagcattccctttgttttaaggtatcacattcttcataaatgatgttttaagggctaggcgcagtggctcacacccataatcccagcattttgggaggctgaggcaggaggattgcgtgagcccaggagtctgagaccagttgatcattctgagcaatgtagggagaccttgtctctacagaacaatctttttaaattagccaggcttggtggcatgcacctgcagtcccagctattcaggaggccaaggtgggaggatcactggaacctggaggttgaagctgcatggaaccatgatcgcacacttgctctccagcctgtgtaacagagtgcaacccttttttgatgaccactagttatatctgatttttttttttttttgagatgagatggagtctcaccctgtcgcccaggctagagtgcagttggctcactgcaacctctgcctcctgggttcaagtgattctcctgccttagcctcctgagtagctgggattataggcacgcgccaccatgcccggctaattttttgtgtctttagtagagacagggtttcatcatgttggccaggttggtcttgaactcctgaccttgtgatccacccacctctgcctcccaaagtgccaggattataggtgtgagccactgcacctggccatatctgattttttttaaagatgtcattttattgaatttgagaattcacttagaccacagatatctgatgaaaaatattcttgttttccttgtcttcctttcatgtcctgcataacctgagtgtgctttagaggtgggatcgtagtgtttgcgtacaagaggaaagttgtcatggccctgtggtcatgaggctgagggcccacgattctgatgtggatggaatgcagctggcattgcacatgtcttagatgctcttcccaactgcccgctttgttctaggcactgtgcagggtgctggagacagcagagaagagtgagatagtccctgccctcgcactgtagagggaaggcctgttctgcctccctgagatgggggcactgagctaaatcacacgtgaggaagagttagcaaggtggccggaagggcatttaggcaaggggcagtgaaaggaaggctggagccgtgcttgggagaccttttaagaaacgtgaacttggccagatgcagtggctcacggctgtaatcccaacaatttgggaggccgaggcgggtggatcccttgaggtcaggagttcgagaccagtctggccaacatggtgaaaccccatctctactaaaaatacaaaaaattagctggatgtggtggcgtgtgcctgtaatcccagctactcaggaggctgaggaaggagaatcgcttgaacccaggaggtacaggaggtggaggttgcagtgagccaagatcatgccattgcactccggcctgggcaacagagcaagactccgtctcaaaaaaaaaaaaaaaagaagcgtgaacttttaccctgtaggccttcagtaaatatttgtgtgagcaaatgaactacttatgcagatcattccctgataacatcagacactgtgttataagattaagccggccaggcgcagtggatcacatctgtaattttagcactttgggaggccgaggcgggtggatcacaaggtcaggagattgagaccatcctggctaacgcggtgaaaccctttctctactaaaaatacaaaaaattagtcaggcatggtggcgggcacctgtagtcccagctacttgggaggctgaggcaggagaatcgcttgaacctgggaggcagaggttgcagtgagctgagattgcgccactgcattccagcctgggtgacagagcaagactgcatctcacaaaaaaaaaaaagaaaaaaaaagattaagccatgaggggcctcccacgcacaaagttctgcccatggttactctgtgccacgaaggacagcatcgatctgttcacactctcgaccttgcttctcgggtacagcaagcactctgggatgctttcccgcagacgtgtcgtgtatcctgcttatggaagcctagcttgggactaccattgctccagcccagtggggtggtgctgttttcctcctggagaacacgggttcctcccagcaccatctccaactggtagaaatgtcaggcgtcacagcctggaaggctttaatcccaatccatatcttctgagtgagcccctactcatggcttcctgagatggagaagcacacggccctcacccatcacgggctcagaggtgtgaccgagaagctggccacctactaagaaagtccttgtgcctgcctcatctccagcgctgccagagctgctgtggactctcgccatgcagtccctctgcccctttgttgtgtatgtctctttcttacagccacactgggacatggctgcagtctctctggcttcagcagatccactctccattgtaaatatcgctgccttcttcctcatgtgttttttttgtcttgtttgacaggctcttcagagtaacctgaggtactccttgttgccaagacggctcctcatcagcaaaagattagctcagtgtttgcaccctgccctgcccagtggtgtccacttaaaagctctggaaacctacgagattatctttaaaatcgtggggaccaaatggctggccaaggacttgtttctgtacaggtgcgattgcttctctgctgtgttcctttttattacccaagtaaccggtatttcagctcacaagatgagaaaatgacaaacaggcaaaataagcgtagggctgtgtgtgcaacagtttatcataaagccatcaccaggagacgtcactgggcgccttctggagtctatccgtcctaactttgctttctttctttttttttttaaatttaagttctagggtacatatgcacaacgtgcaggtttgtcacacatgtatacgtgtgccatgttggtgtgctgcacccattaactcgtcatttacattaggtgtatctcctagtgctatccctccccactcccccgaccccatgacaggccccagtgtgtgatgttccccttcctgtgtccaagtgttctcattgttcaatccccacctatgagtgagaacatgccatgtttggttttttgtccttgcgatagtttgctgagaatgatggtttccagcttcatccatgtccctacaaaggacatgaactcatccttttttatggctacatagtattccatggtgtatatgtgccacattttcttaatccagtctatcatcgatggacatttgggttggttccaagtctttgctattgtgactagtgttgcaataaatatacgtgtggatgtgtctttatagcagtttgatttataatcctttgggtatatacccagtaacgggatggctgggtcaaatggtatttctagttctagatccttgaggaatcgccacactgacttccacaatggttgaactagttaacagtcccaccaacagtgtgaaagtgttcctatttctccacatcctctccagcaccccatttggactttgctacaagggaactttagcatctgaacgtgcggacagcttcattgctggcttgttacgtaacagtgttttgtgaccatctcatgtcatacccacacatcgaaaccagcagtttaaatggccagctgtttgcttgtgaaaactcccctcggctggcttgtcacctgggacttctgactgggtatcttatttctgccccgctccctctcgttctttctcgaagctgcgggttatttcctctcctggcacacgcggcggtgtcggtgaggccggtgctgctcaccctgtacgagaagtacttcctcccactgcagaagctgctcctgcccagtctgcaggccttcatcgtgggcctgctgcccggccttgaagagggctccgagatctccgacaggtgcgtgggcgtcttgtccaggctgtgtttactccactgctttataagacgcggggagggggccgggcgcagtggctcacgcctgtaatcccagcactttggaaggccaaggtgggtggatcacaaggtcaggagatggagaccatcctggctaacacgatgaaaccctgcctctactaaaaataaaaaaatttagccgggcatggtggcgggcgtctgtagtcccagctactcgggaggctgaggcaggagaatggcgtgaacctgggaggcggagcttgcagtgagccgagatcgcaccactgcactccagcctggacaacagagactctgtctcgaaaaaaaaaaaaaagacacggggaaggaagtgcagagacatgggaagcagcagtaggtgtggaggtcgggttgctctttcacatttccttggtggttgtgatttcaaattcctcccgggaatctctcttgtctctttaccaaaggggaagtcccgagcccggagagatgagatcctttaggcggagagaaatgtagctcattaataagggagaccatagtgcagggttcccatgatgtcctgtcccgttacggagttacccacagagtcaccatgtgtggagggaagacataccctcttagggcgcctagtgtggaggaaatgaagggaccctttcctgggcacttgcagcgtgcattacacacatgatcacattgtgtaatgaattcctctgctccaggagttacctccatttacaggtgagggtcagagggtaagaaggtttcccagtcgcacagtcagtgagccccacagctgggattctattccactgtatctattggattcttttttttttttttttttttgagacagagtcttgttctatcacccaggctggagtgcagtggtgcgatctcggctcactacaacctccgcctcctgggttcaagtgattctcccgccgcagcctcccaagtagccaagattacaggctcgtgccaccacacccagctaatttttgtatttttagtagagatggggtttccctctggcggccaggctggtctcaaactcctggcctcaagtgatccgcccacctcagcctcccaaagtgctgggattacaggcgtgagccaccacacacggctcatatcagattctaaagtccttcttctttccattaaactaggctgcttctaaattaaaaagcaaagccagggcagggcttgagaaggcaatttagtgtgatgtgaagcagaatatcttgacaggtttcagtagcaccttggagaaatctatagcactcatatgcacaaaagttcatgtagctttgtgtgtgtgtgtgtgtgtggtcactgcttaggaatgggagaaagtgtgaatctgttccgactattgagtatggccgggcacggtggctcacacctgtaatcccagcactttgggaggccagagcaggtggatcacttgaggtcaggagttcaagaccagcctggccaacatggtgaaaccccatatctactaaaaatacaaaaaaattagccggacatggtggtgtgcgcctgtaatcccagctacttgggaggctgaggcaggggaatagcttgagcctgcgaggtgaaggttgcagcgagccgagattgcaccactgcactccagcctgggtgacagagtaagactacgtctcagaaaaaaacaaacaaacaaacaaaaaccagactgttgagtatacacagtgacctttgtttccggagaagtataaagtaagaactcacttccagcttattaactcttctgagagatgccacagtgattcacctctgttaatgggacctgttttaagagcccatgttcagtcactggtgacttttgtgcttgtaaaagctgccatgtgattacacaacgcgctgctcatattaccctgtgctggaggccctagtcaggtcaccctttcctgtggtgtcagctgtgactgaggggtgcaggaggctggagtctaacccaggaatcaatccaaggtccatttgcacggctcccccagccttaagtaaaccaagtaatcagaatggtttgaagggttagttaggaagtggccaagggtgcatttcgtgagctctatatcaggacttgacagatgtaactaaaacattgcactttaaccatttcaagctctcacatagaccaggtgttggctctccatttcccaaaggagaatccacctttacagtttctaccttaggaggcagaatctgtctcgttgcggttttaagcccagcgccaggccctgtggctggtacacggtgagactcggtaagtgtgtgttgagttaacgagtggtccaggtcacataggaggcagctggaggacattgccagactccatgccaatggactcctaatcccaggccctttctagaagttctgctgtgtttgtgttctgatgacagatatgtgagtatacatcctacatgatttttccatcattggacagatgaacacattagttccctaaagcttactgtgatcttttaaatctgtgtgaatcacactagaagtgtaaatagttggagtgtttttgttttcttagttgataaataaaggttcatttgaacagttgctaaagttgcttaacattgattttttttctgaatattgtgatttcttgacattgaaccaagagccaagtaaagcttcatgaatcaccgaatctatttagctgtgacagaaaaccaaatgcagtgtggcacccagaagtgattagttatcagctctccaaggtggatgcaggtgaaaggttatacaataatctctgagccagtgtgttgcagccacagtaattgaagtgactgtacaagattttttggttgctatatccatttcagtctgagacggtttggtaactgttcccagaagtgcttgggtagccaggtgtggtgacaggcacctgtaatcccagctatttggaagactgaggcagaagaatcacttgaacctcggaggtggaggttgcagtgagccaagatcgcaccactgcactctagcctgggcaacagagcaagactccatctcaaaaaagaaaaaaagtgcttgggaattgagtgaaacaccccaacaaatgtgcagagagcagaaagggagggtgcagtggggggggtcatgatgagcacgtgggtagaaattgcaaagtggtgagttaggttgagctggtgaaggctgggatgactcacaggtttcatgtaggtggaggctgtccctggtgtgtgctttttagtgaaccataaggaatgaaacttttggcccctgttagaacttattatccaccctggctttctaaccctttggggtctgcagataacctatgactggtcagaaatcctttttttttttttttaagtgcccatgaaatagctacatagctgtgttttgctgtactaagaaaacaagattagaacagggaaagcactaaactcttcttctcaggagatgaggagaggtgaatgttttaaatggtttgtaagaaggcaacaactagctcaccagatatttccatttaaatcagtaattttcaatgtagtagtaattttgcctctcagggtacatttgacaatatctggagacagttttggctgtcacaactgggggtggggagggtgctactgatatttagtgggtagagtccaggagctgctgaacattttacaatgcacacaggtgccccgacaacaaagacttacctggtcccagatgtcagtggggtggacgttcagaaaccctggcttaaagagttgaaaaatatttattgacatttcttttcttttggagctcattaataagggaggccatagtacagagtttccatgatgtcctgtcccattaaagagttacccacagcgtcaccatatgaagaggggaagacgtaccctcttagggcccctatcgtggaggaaacaaatggaccctttactgagcacttgcgacgtgcatgacccacatgatcacattgaattccagggtcttgctgtgtacccaggctggagtacagtggcaggattatagctcactgcagtctcaacctccaaggataaaacgatcctccggcctcagccttccaaagcactgagattacaggcatgagccaccccttttggctgacatttctattttttttttttttttgagacagtctcgctctgtcgcccaggctggagtgcagtggcgcaatcttggctcactgcaacctccacctcccgggtacaagcgattctcctccctcagcctcccgagtagctgggactacaggcatgcaccatgacacctggctaatttttgtatttttagtagagacggagtttcaccatgttggccaggctggtcttgaactcctggcctcaagtgatccacctgcctcagcctcccaaagtgctgggattacaggcgtgagccactgcacccagcaccaacatttcttttggttggtttcaggcactgtgatcatgatctgtgctggttcgaggctttttttttgccccctctttagcgctgtttctgacctgcagtttacagtacagggtgctgttgtcactgccctgcctcttcagtttcagatgattgtaccaaagcggtgctgtcttgtgacagcttggctttccatggttgtccttttggcaagcagctgcagaaccaaagttgtggagtgcttgggatttgcggtgcccggcccatgccactcacctgctctcagttgtggagtggagcatgccagtgtcatttgaaggagctgcgtttgcaggaggcatgagagagcataagctgggatgagttaggaaggatggaaatacttggggtttggaagttgggtttttttttttaatgtttgttggttttttgtttgtttttgttttgttttttgagatggagtctcactctgttgcccaggctggagtgcagcggtgcaatcttggcaccctgcagcctccacctcctgggttcaagcaattctcctgcctcagcctcacgagaagctgggattacaggtgcgaaccaccatgcccagctaattttgtatttttagtagagacggggttttaccatgttggccaggctgatcttgaactcctgggctcaaatgatccacctgccttggcctcccaaagtgctgggattacaggtgtcagccactgtgcctggcccgtttgttggttttgaattaaaagtttagggttcccagtggggcatggtggctcatgcctgtaattccagcactttgggaggccgaggcggggggttacctgagctcaggtgttcaagaccagcttggccaacatggtgaaaccccgtatctaccaaaaaaaaaatacaaaaattagccaggcatggtggcggctgcctgtaatcccagatactcaggaggctgagccaggagaatcacttgaacctgggaggcagaggttgcagtgagccaagatcgtgccattgcactccagcctgggcaacaagagtgaaactccgtctcaaaaaaaaaaaagtttagagttctggactgtaaactgcacactaatattggaatttaacaaccgagatgatcatagtaactcttgttgagtaggaagttatttcgtttttaaccccgtttattttgctctctcataccaaaggtttgtcatagttgctgttgtttctactatgatgtcatttaaattgttagtatgcatccattttttttagaataaaatgagacttaaaaaacaaagctggctgggcacagtggctcacacctgtagtcccagcactgagaggccatgcagggtggaccacttgaagccaaaagttcaagaccagcctgggcaacatggtgaaactctgtctacatataaaatgcaaaaattagcccagtgtggcagcatgggtgtgtagtcccagctactcagaggctgaggcaggaaaattgattgagcccaggaggtcagggctgcagtgagctgtgttcatgccactgcactccagcctgggtgacagagtaacaccctgcctcaaaaaaaaaaaaaaaattatttctttaatagaaagctagtagccagttttcagaatattgaagagacaacataggcagcgtttcccatactttttgagggtggaacccctcttctgtggaacatctctagtggccagtgttccatggaacatactttgggaatatgcagttctaattaaagggggactgtgacaccacgatgtgtgcattatagtgtttgtgatgatttcagagctaggcaaagacaagctctatttgtttactcagcctttaatagaagaccaatcaataacctcagccattaaatcgccctgcctacttcttctatacacttagccattacttatgtctcttcatttttattttttctaagaagacggtaccatgcattatttcctgcaatattttacaggaagttcagactaattttaaggagaacaaaatgtacttttaatataacgcgatggtagatatttttgaaggaaatacaaaaaaattaaccgaggggtttttcgagtgccaacctggagtcacttgctcaaataggcactggggctgtgacagcaaacagagtggacctagtagtaattgcaggcggcatggcccaagcattaggtctgttcttctgggttgagttttttttttttctttttttcttttcttttttttttttgagacagagtctcactctgttgcccaggctggagtgcagtgacggcctctcggctcactgcaaactccgcctcccggcttcaagcaattctcctgcctcagcctccccagtagctgggattataggcacctgccatcatgcctggctaatttttgcatttttaatagagatggggtttcaccatgttgtccaggctggtctcaaactcctgacctcaggtgatccacccgcctcagcctccccgagtgctgggattacaggcatgagccaccacgcccagccaaacagttttttttgttttttttttttttttttttgaggggactctcacttcattctcacaacatctccacgaggtcgaggctccttcccctgtcttttagctgagcacgggcgtgcacagatgttaaactggtcctaggtcctgcatctaggaggcatcacaaccaggatctggacacgggagggccaactctggcaagctctgtgaaccaacacattccaccgggttggtttttctgattgttttttgtggtctttgcagataggaagcatgtgagaaactgaatcctttcaggtaatgagtcagatccttcgtggggtgatatcccttagggggaatgtgcctctgctgttttactggtagatgctgtcacccagcctgcagattgtgtgcactgaggacagggaaagggccgcagtcagctgcagggacaccaccgaacagacatgggcctggccttggtcagcgtcaggggaaaaacgagccctgatccactggtgacgctgcttctcttaaaaggatgcatgagaaggtgctgactttgtatcacgggagacctagataaagataagaggcgaacaaatgcccggcctcagcacaagagcccctgggagcgggagtcagcacatgcaggtgctgtgggcagactgaaaggaaacaccactccaggctgatggaatttgcagggtcgtgggaggccccaggcagatttgcccctagcatttctaaaggcagatgtcacttggcacatttttggctgtgctcaagttggtggcatctaattgcttaagtctttgatcagtctcctcagcatatgcttgtttttgatacaccaatggctccttccgcttttctgtgaagtggctgacctgcctatccctcttatggtggaacctcccttccgtgagcacctaggcatccgtggcacggccagggtggagatgggtctctgccctgccacgcacgactgcttagccactttccattggccaagacaccgcgctgcctagtgacattggttttagcaaatccagggtcagtgtgacagccagcaggtggacacacacagcagggtgagagatggcagcggctcccggcgatgaggaaggtggggcttccccagccaggcgaatccgctgtggttcttcatgcagcattcgcagagcagtgtgcagtgggactcgggaagatggggcgagcccttgaaccctatcctctctcatcaacagaacggatgctctgctcctgagactgtcgctggtggttggcaaagaggtgttttacaccgccctctgggggagcgtcctggccagcccgtccatccgcctccctgcctcagtcttcgtggtgggccacatcaacagggatgcccccggccgggagcagaagtacatgctggggaccaatcaccaactcacggtgggtgctgtgttcctcacagggcatggggaggaggcgacatgtgggcacagcatcctcatgggcaggttgtcactgaagctgcaaagggacatccaggaaagggaggtgcaccaagcttaagtctgggtaacgaacggctgagcaaggcgagaaggaggccttgtgcagttgaggctggtggtggcttttttaacatatgcattaaggttttttttgtttttgtttttgttttgagacggagtctcgctctgtcgccgaggctggggtgcagtggcacaacctcgactcactgcaagcttcgcctcccgggttcaagcaattctcctctctcagcctcccgagtagctgggattacaggcacccaccaccatgcccggctaatttttgtgtttttagtagagatggggtttcaccatgttggccaggatggtctcgaactgcctgcctggcgggtgatccacccaccgcggcctcccaaagtggcattaagattcatacattcaaataagtgttcacaccctcagaggtcccttctggaggcccctggctttgcagaaatgtgcttagctgcacacggcgctcagacggcctctgcacgcagagggtctgctgcattggcgggtctttgtttccttcctctgtcctgtgtcacgggggccactgcccactcacacatggaaaccccctcctcccttggcgtcctccccctcctctcttgtctccattggctgctctcaaacctaaattattggggtcccccaggtatccatctccaggcccttcaagggaagctctcttccctggtaacgacatcccttctcgtgcccttagaaatggtaacctcccagatctttgtctcttttccccaaacctgcctcttgtgcttttgtgtcttgctgtctttcgccacctggtggtgttcccacactttgatcttaaagtgttcagattgaattcgcaggtgagaagatctgcagctgagtgtgaattaccctctggttccatttctctttgcaaaatgggggttgtagacctgcttcacaggatctctctgatgacaaggtggaaaaatggatgaaaagcgcctcgcacaatgatcaggacacaggcgaccccgatgaacacgtccctttcctgccccgtcagtatcccctttgtctctttctctccatcgtctcagccctgctctggcttcttgtctcttactcttggatctgactggtttcttcccatcccaaatctgctaagagatttgggatggggagaaagcctagctttgctcatatgtatcctgtgctttaaaaatgtctgacttcccggctgggtgcggtgactcatgcctgtaatctcagcactttgggagccctgaggcaggtgaatcacttgaggtcaggaggtcaagagcagccgggccaacatgatgaaaccccacgtttattaaaaatacaaaaattagcctgggcgcagtggctcatgcctgtaatctcagcactttgggaggccgaggcgggtggattacctgaggccaggagttcaagaccaccctggccaacatggtgaaaccccgtctctactaaaaatacaaaaatgagctgggtgtggtgatgggcgcccgtagtcccagctactcaggaggctgagacaaaggaatcgcttgaacctgggaggcgggggttgcagtgagctaagattgcaccactgcactccagcctgggtgtcaaagcgagactctgtctgaaaaacaaacaaaaaaaattagcagagcatggtggcgggcacctataatcccagctactcagctgtctgagacacgagaatcgcttgaacgccggtggcagaggttgcagtgagtcaagatcacaccactgcactccagcctgagtgacagagcaagaccctgtctcaaagaaaataaaaaaataaaaatatctgacttcccattgccaacagctatagtccaagctcaagagcattctaaccatctgctcccagccacagcacctcactcttccctgcaggccctgcgctcccacacgactgccacagggcctggcctcacagtgcctttgctcccggctgttcccttctgtccccctggctgtgcattcctgcccttcttcgaggtctcagtgtagctccttcctgttcttcaagcccagctttcccgtggagcatcattgttctctgcagttgaaagagctctcctcttctgaactctgagcgtttgtctgtggctctaatttcttatgcatctctagtctacctatctgtattcagaaaagacactcagaatatctactgaattgatcaggaattattttcccatgtgtcttcagagctttagtttaaggttcctgttggatcctttctgggatcgtagaatttgagatcatagaacccggccatctggtccaaacccctccggctctcacgtggaacagtgaggtctgcagctgaacgtcttctccgatgtcacgcagcctgtggcctcgagagctagaacccacaccctcctgacctgtggctgctggttctcttctgagtgatataacgcaggagtttcaagattcccgggaaaggttactttcgtttttatgatcataaagagtagcctgaaaatgctagtgccgtttgatcgtttacaggtgaagtctttgcgtgcctccctgttggactcaaatgttcttgtgcaaagaaataatctggaaatcgttctgtttttcttcccattttatacctgtctggtaagtaatttgtactcttctggtaagtcactggtgtttcccaaggggtgggatatagatctcaagcagttctgtcgtacgaggacagctcagccactcatgggcattatttgctggtagccagtgaaaagtccttgttcatttttgcaaggatagcgttttcattgcacgtattgaatagcttctttccatgggtaatgtgtaaggaaccagcccattttgagatagagctttgcagaccagcaaggaagggctgcgtgtcaaaaagtcagcaatctgccctatcattcccttgcagtaaatttctctgtccttctaataggattccaatgagagagccatccccctcctcagatctgacatcgtgcgcattctctcagccgccacccagaccctactgagaagggacatgtccctgaacagaagactgtatgcatggttactaggtactgagcagtatacacccttttaaagtcaaagttaatatgaaaccttttagtgctgacttctggaataagatttggtcttggtgatgtatctctgaatcatgaagtatggaaagataccacaatgactaaatatggcactggtcagttgaggtctgctgcctacacatagcttggttattttgcagtttcttttttaaaaaaggggaaataataagtgggatttttaaaatgccaactgaattccatttaagagcttgaaataccaccaaaaagtggtagcgaaaccttattcaggtagaagcctgttgctatggagaagttccatgggatgagggtgtatcgtggagaaaacttacaaatattgtggaagatatgtagataaaggaggaggttttgtgtaagtgtaaatgttttgggagacatttggataactttggagatcacgagagcccctgggccatgtttctgtgtgtcagagtgtgtggactgcctataaatttgttggcaaagggcccttgactattggttggaaggcctcccagggacagagcctaggaaattgcaactttaaagataacacgttcatgaattttctaaagtcccatattcacgtacctaagaaaacgtatacaaaacgattgtgacaggacttaacagctctgatcaactctcaacatttagatcttttttttcctttttgagatggagtttcactccgtcgcccagactggagtgcagtggtgcaatctcagctcactacaacctcggcctcccaagttggagtggttctcctgcctcagcctcccaagtagctgggattgcaggcacccaccaccccggctgggtaatttttgtatttttagtagagatggggtttcgccctgttggccaggctgatcttggactcttgacctcaggtgatctgcccacctctacctcccaaagtgctggaattacatgccaccacactcagcctagcattcagatcttatcaaagatcttaccaaagtcaagaagtcctcttcagtccttcctgctcttctccctagttataaaactttagaaagtcattgcatggaagcttactaaggattttaagaagactatttgtaggctctttaaggatttgtatgtaaaggatgattttgtcaagggcacagctctgctcctacgggacttgatatgctgtgtggaggacactgggcctgaccacagtgccagctctggctcacttacttgcggccccaggagccccatattctttgcccataccatgaggatgcactttcttgccctgagaaccttgcagacttatccagggctccagctgatgggagcatgtgcatgagaataccttgatctcacataatgctggacaaaaaaacactggttttaaaaagtgatcctcagccaggcatggtggctcatgcctgtaatcccagcactttgggaggccgaggcaggtggatcacctgaggtcaggagtttaagagcagcctggccaacatgctgaaaccccttctctactaaaaaatacaagtgattcttctgcctcaacctcccaagtagctgggattacaggtgtgcgccatcacgcccggctaattttttgtatttttagtagagacggggtttcatcatgttggccacgctggtttcgaactcctgacctcaggtgatccacccaccttggcctcccaaagtgctgggattacaggcgtgagccaccgcgcccagccaacagggtgaattcttagaacaaactaaattgatacccattgaggtggaattctgcctgtctgatcattagccacaccactgtcagaagaagaaaatctgacgtggtctttctggatctgattttggttttccatcagaagaatgatatttttaaaaatattggagcatgagacttttgcacaatatgatgtcctttaaaagcacagctctctttacagctcggcgcttgttcttttgtaggctcagacataaaaggaaataccgttgtgccagaatctgaaatctcaaattcttatgaagaccagtcgtcttatttttttgaaaaatactccaaggatcttttagttgaggtaaaggagcatttccggaaagttcagggtatccttggtgacgattctccagtggatttctttgggaggcttccacataggcagtgagcacgttccttggcccctggtttggggaactgcagggtatttgttgcatgctgggtgactggttttccttctgtcccagagtatttaacaattagaatagccagtaatgttgttacactttatgatatacgatattctaatatgtggctttttttaaataatagggtttggctgagatattgcatcagaagttcatagatgctgacgtggaggaacgccatcatgcatacctgaagccttttcgcgtcctcatcagtctgcttgacaagccagaaataggtaatgttagaaatgctgcttccatcctatgctgaatacagattacctgttttcagggaaatacaacatggtgagatacaaccaaagcgttattttgaatataatttaatatttggaatttcacaactttgaagtcatgttatatggttcaatgatcatatctgtggtcacttacaagttttgcatggctgggcgcagtggctcatgcctgtaatcctagcactttgggaggtagaggaaggaagatcacttgagctcatggatttgaaaccagcctgggtaatatggctgaaaagccatgttgaaaaaccccatctctataaaaaaatacaaaaaaattagccaggcgtggtggtgcttccctgtagtcccagctaccaagtggctgaggtgggaagaccacctgagcccagggggtcgaggctgcagtgagctgtgattgtaccacggcactccagcctgggcgacagagtgagacccagtctgaaaaaaaagttttgcacaataatttgaacattttttgttaggaaaatacctttgagctcctatagtgtctacagaacatgtggtatttcctttttaagcctattttttcaatgtcatacttaaaatgagctttggtttgattttcaattaagtaggggaccccgtccatctttttgccttgggatcctgggcaagccacttcttttcactgtggagagtaaaaacattttcactgtaaaatgaagagggttgaactagactctggtcaccaaaggctcccttcttagatactatggtcctatgagcataggttgagaaaagtgaccttctctcactatttatttatttatgaatgaatgaatgaacgaatgaatgaatggcagagtctcgctctgttgcccaggctggagtgcagtggcgcaatctcggctcactaaaacctctgtctcctgggttcaaacaattaattctcctgcctcagcttccccagtagctgggattacaggcatgtgccaccatgcctggctaatttttgtattttcagtagagacagggtttcatcatcttggctaagctggtctcaaactcctgacctcaagtgatccacctgcctcggcctcccaaagtgttgggattacaggtgtgagccactgcacctggccctctccctcactttaaaaagaaatttgcgaccaggcacggtggctcacacctgtgatcccagcactttgggaggccgaggcaggtggatcatgaggtcaggagttcaggaccagcctggccaagatggtgaaaccccatctctactaaaaatacaaaaattagctgggcatggtggcgcgtgcctgtagtcccagccactcgggaggctgaggcaagagaatcgcttgaaccagggaggtggaggttgcagtgagccgagattgcgccactgcactccagcctggcgacagagcaagactccatctcaaaaagaaaagaaatttgcggccaggtgtggtggctcacacctgtaatcccagcactttgggaagctgaggcaggtggatcacctgaggtcaggagttcaagaccagcctggccaacatagtgaaaccccattcctactaaaaatacaaaaattagccaggcatgacagtgcacacctataatcgcagctacttgggagtctgagtcaggagaattgcttgaacccaggaggtggagattgcagtgagctgagatcgcaccattgcactccagcctgggcaacagagtgagactccgtctcaaaaaaaagaaatttgctaccatatcagctcactttaaggtctgcatctgcttatgtgagccctataccagggaaaagatccccatgtcttccataggattgcaagcctaagaatgtcatttcagtgctccaggtgtacctgcctcctggtagctgtttgcagaggacaagagagctgagggctggccgggtgtggtggctcatgcctgtaatcccagcactttggaaggccaaggtgggcctcacttgaggtgaggagtttgagaccagtctagccaatatggtgaaaccccatctctactaaaaatacaaaaattatccaggcatggttgtgcacacttgtaatcccaactacttgggaggctgaggcacaagaatcacttgaatctgggaggcagaggttgcagtgagcagagttcacaccactacactccagcctgagtgacagagcgagactccatctcaaaaaaaaaaaaaaaaaaagagagctgagggcattagtgaagtggcctctctctggccttgggatggaggcccttcgcttatccattcaaaagcacagagcatctgccatgtggcagggatggtgccagctctagggggacaaaaggggagcagcttctcatgaagttagagggaaggggagactccatgttcctggagtgtttttactgttcattaataataaccatggctgacattttttgagcaattattttgtgccaagtgatttacatacatccttttatatctgtctgcacacacacctctgtccctccaacaaccccaaggtaggttctcccactatgcctgttttacaaatggaaagactaaggttgggtgggagtaggtaatttgcccagggccagtcaggagcctaagctgggtttgtcagcaccccccgatgcttgcctgattgcactcagagaagtcctacccgagatgtttgcctctgtcaccaggtgaactttattccaagagttgtgcagctctcgtcattcttaacgaaagtccaagtatgaagcttttgttcttccaggctctgcccatgatgtgctgcctcagggtgtctgcactttgttcagattcctcttcccatctgcccgctcccaccttaaaccaaatagattttcctgctagtgtagagtaactgcagctctgaaaaatcatgatttagtccaaaaagtggaacacttatataaatgtattgggagcttgctgtgtaacttcagggaagtattaaaagaagaaaatataacttagcattctggagatgtgtgttttatgtcaaagccatgcaccttggtgagccaagtaaacgttgctgctaacttggctccaggtcgtattttctggaagcaaatgaatatcacgctcctgcccaatcataacagtcacttaatttactctttccaattttttagctgtctgcaagaaatcacactcaggaggcaaaggaggtgattatacagaactagaaggcacaggacggccattcagtccagtccatactttttgtggctgggctttagccatacctcatttcctcctccatcaatcaaggcaacaaaattgccttcatttttgtaacaagcatttagcattcttatgctgtagataaaatacacaggaagccaaggccaggtgcggtggctcacacctgtaatcccagcactttgggaggccgaggcaggcagatcacctgaggtcaggagttcaagaccaacatggcaaaaccccacctctactaaaaatataaaaattagctgggcgtggtggcacacacctgtaatcccagctgcttgggtggctaaggcgagagaattgcttgaacccgggaggcggaggttgcagtgagctgaaatcatgccactgcactccagcctgggcaacagagcaagactctgtctccaaaaaaaataataataaattctatcttaaaaaaaatacacaggaaacttagcatgaaaataattctctcagaggcacatcttttggttttgtgaaaagaagtgtaaaagattggattaatctgcttttttgccagtgttgacagagctttcattttctctgaattgattgtgtgtttctgcctttggatacatgggtaagaagtcaggccctcagctgcctgagggttgcggtttgcggagcagcaatgccctgcccatcccctgcctggttgcagggaagcttctctaacatgcagctggtccagttcttttgtgccatctttctcagcgtttcaggatagccatcatttcttttgtgttgctccagctcatgactaaaggaattgaagaagttgccctgctctctggatatttctgttgagtaacgtccctggccagcagtttatgcacacttaacacacgtagtctgcgctctgcctctatctagcagaatctgctttgggcaagttacttaacctctctgtgcttccatctccttatgtgtaatcagcagtacaggatctgtctgcatggctgttacgagggtttaatacgttaatagatgtaaaacgcgtagaagggtgtctggcacacaggaagttctacaaaaatgttggctattttcatgaatgttgtttccccagctaaagttgtcaccagtaaagttaagtttctgtatattttagactatataaaatgtctgtctgcacaggtttactgtatatatgtcttatgtatatacatatgtcacttactgatttaaaggggattgttaatctgtctctgaccatcttccttctaattacagggcctcaagtggttgggaatttgtttctcgaagtcatcagggccttttattcttactgcagagatgcccttggctctgatcttaaacttagctacacccagagtggaaattcgctgataaggtatgggtttggccttgaacctcacgcatctctctccctccccggtactgtgattttttttttcctctcttgcttactataaattgtgaagtggtagagaaagcagagatgcagcaggtgagaccattggtgaaaataatcaatgcgttgaagtcagtccatgggaattgactgttccctactgagtacggtgaagagtttaaagggagtttgatatagtctttcccccagcctgggatggacaggtatttattgattttttgatcaagtatgaaacaatgaaatgtatgtattgatcaagtatgaaactcgtttaacaaaggcagcttgatctagtatacccaagtggtgagttacagggcagagagaacagagaaaatggaggggagggcacctggcaagtggaaaggggatgtgagtcttcaggacaggagtccagggggtgttgggggagattgggggagacccaggcagggcaccggagagcacaggctccattcccccagaggcagagtgagtggtgtttggaagacagcgggcacattggcctcacgtgcgcagttacacacaaaccctgttttgtttgtttattttgttccttttaaggggatacaactttttcctttttgctttactcttaatgtaatttccttctgcctgaactagcattgggtacattgaaaatttaaatcaatgttaatatttttctggtttgttagttgtaagtgtactaagagttcttagtgtttgcttttttctcccagaatgaaagcggtttattgtttttctgagtatgaaagtaatacatgctcattgttgcatttactgatatttgaaagatcaagaaaaaaggtgtcacacgtaatcctagcactcttcagagaaaaccataaaacatttttacttctttctagatttctactacatacataaatacatagatgcctgtcttttattttaaaggtagaattacaccagttatttagttgcttggggttttctttttgttttcttgttggtttgtttgtttggttttgagacagggtcacccaggctggagtgcagtggcgtgaacatggctctctgcagcctcagtctcctgggctcaagcgatcctcacgcctcagccccttaagtagctgggactacagacatgcaccaccatgcccagctaattttttttttttttttttgtggagatgaggtttcaccatgttgctcaggctggtctcaaactcctgagctcaagcaatctgcccacctcagcttttcaaagtgctaggattataggtgtgagccgccatgcctggtactctctggagtgtcactctccagcatgacaaggtctcactctgtctcccaggctagagcacagtggcaccatcaatggtcactgcagccttgaactcctgggatcaagtgatcctcacacctcagcttcccaagtagctacgactataggcacacacaaccacacctggctaatttttaatttttctgtagagacaaggtcttgctatgttgcacaggctggtcttgaattcctggcctcaagcagtcctcctgcctcagcctcccaaactgctgggactacaggtgtgagccactgtgcccggccactgcttgttttttaaaatgcaagttgtgagtagctctacactattctcctatgggattagttgccttagatatttgttaaggatttatcatttatttaaggccaagtgcagtggctcacgcctgtaatttcagcactttgggaggccaaggcaggcggatcacttgaggtcagcagttcaagaccagcctggccaacatgacaaaacctggtctctacaaaaaaaatacaaaggttagccgggtgtggtgggccatgcctgtagtcccagctacttgggaggctgaggcatgagaattgcttgaacctgggaggtggaggctgcagtgagccaagatcgtgccactgcactccagcctgggcgacagagcgacacttcatctcaaaaaataaataaaaataataaatcctgactgaccaatttcttattgattgacttttagacagtttctgctttttcagttttgtttgtttgtttgcttttgagacagagtcttgctctgttgcccaggctggagtgcagtgatgtggtcttggctcactgcaactccacctcccaagttcaagtgattctcctgcctcagcctcctgagtagctaggattacaggcacctgccaccactcctggctaattttttgtatttttagtggagatggggttttcaccatgttggccaggctggcctcgaattcctgacctcgtgatccacctgcttcagcctcccaaagcactgggattacaggcatcagccactgcgcacagcctgtttgtttgtttttgagacggagtctcgctctgtacccagcctggggtgcggtggcgccatctcggctcattgcaacctccacctcctgggctaaagcaattttcgtgcctcagcctcccgagtagctgggattacagatgcccactatcatatctggctaatttttatgtttttagtagtgacagagttttgccatgtttgccaggctggtctcaaactcctgacctcaagtgatctgcctgcctcggcctcccaaagtgctgggattgcaggtgtgaactaccacacccggcctttttcagtattttttaatggccatttagtggtacacttctgcacacatctatgtagctgtgcagggatttcggtaggataaatttcttgaataaatttcctgagccatagaagataaaatttaaggctggatgctatggcttatgcctgtaattccagcactttgggaggctgaggcaggtggatcacttgaggtcaggagtttgagaccagcctggccaacatcacggtgaaaccccgtctctactaaaaatacaaaacttagctgggcgtggtggtgcacgtctgtaatccatcctagctactcgggaggctgaggcaggagaatcgcttgaacctgggaggcagagattgcagtgagccgagattgtaccactgcactccagcctaggaaacagtgagactgtgtctcaaaaaaaaaaaagaagataaacatttaaaatcttggctgaatttccctgctgaatatccatgtaccatgttattccaccagtagagtatggactaaaactgattttctgtacaaattctttttacagtagctctgaaattattattattttatttttatttttattttttgagacagagtctcactctgtcatccaggctggagtgcagtggctcaatctcagctcactgcaacctccgcctcccaggttcaggcgattctcccacttcagcctcctgagtacctgggattacaggtatccgccatcatgccctgctaatttttgtatttttgtagagacagggtttcaccatgttggtcaagctggtgcacccacctcagcctcccaaagtgctgtgattacaggtgtgagccaccgcacccagctctgaaatttatttttaagagactgtatcaatataaatattgtttacgatggcattatgcaaacacattataagaacagtaatattttcatttttatcagggtgtgtcagcttctctagaaataagttgcagatggtgaaatcaattacagttttttggacactttttgtaattcaggatttttttatagacatatttattcatgtcctccccttttacagtgcaatcaaggaaaacagaaatgcctctgagattgtcaaaacggtaaatttgctgataacttctctaagcacagactttctctgggattatatgacaaggtgttttgaggaatgctttaggtaagtatgcagttcaagaatgcagaatatttaggaaggatgagagggtttaataattttgtagctgcttagaatatcagattatatataagtagctgaagctgagtagtctttcctgagttttaaaattcaactaaaacaggattggaaagaattcacttaagattctagcagaataaaaacatctccaataagaaggttcacataatctttgccatgtaattctgaagctgctttaaaagtctaactttagaaaatcctcagcgcattttctggttacattcatcaaatcagctttcctctcctggctgcccgatctattgaaagcagcttagttttgtggctttgtgactggatagagtgtttttgaaactcttgctgaaatgaatgtaactggtcagataaaagcattaatgttttaagctactataatcagctttaccatctcttttaaccgggtgaattgcaccacccctaaattgtttgcagtggcgtaccccaggaataccgagctttcctggagagccctttcccatgccattttctttacgggaggaataaggtcatgtctcaaaccctgttttgtcctgaggcatgctgtaaaacttatttcttgttcatctccactgtaatgctcttggctgtttcagagtcttacttctcagctgctaccactacacttttctgcccaaataagctcacaaccctgggaaaaataagttaattgcaattggatccacaggcaacagcaaggccatattatattgaggttagagtatgctttggtcagcctggttgttatgttattttttattttatgacggagtctctgtctctcaccgagactggagttcactggcacgatcccagctcactgcaacctctgcctcccaggttcaagcgatcctcccatcctggcctcctaaatagctgagactacaggctcagcctcccaagtaactgcgactacaggtgcacgccaccacacccagctaatttttgtatttttagtagagacagggtttcaccatgttggccaggctggtcccaaactcctgacctcaagtgatccacccgccttggcctcccaaattgctgggattacaggcatgagccgccgcatctggccatcctggttattaaaaaaaaaaaaagaataaaatgtttctacccagatagagctgactctccatctttgcaacattttgtcctcttttcatcccagagttaatccctgtcctgagattaatgtctgtcttcagtgtaacatggctttgctgttgcctgtggatcctattacagttaatttattcatcccagggttatgagatgaaaagcaatagatactttttaacttacccatttatctagtagcctgtttattttaaaagaagtcttgaatttcagtataagataagcaactaacaatagttgattggtggggttacacttctctacagaagctgaaactttctaggcaactcaggtgctgataaactcctggaattacttggagaggagtagtcccaggccactcctacagcagggtgaacagccatgtggactgtggtgttctccagcccagcctcgttcccttggatcgtgcttttgggcttggactggggacttgggattacatctgtcgatggtactccaggtctcctgggagacacctgaattggtagagttcaagtcagagggaatctgtttggacaccaacagattcaggacacttattgacacttctacatgttagatacttttagtcaccaaaatttagttatgagaactacaaaagctgccttccattatgtttgaagtagaataacgttactggaaattgtaagaaatgcttggacttaccgcaggaagaagaattgattttttttttttttctgagacagagtcttgctctgtcacccaggctggagtgcagtggtgcgatcttgtctcactgcaacctctgcctcccgggttcaagtaattctcatgcctcagcctcccaagtagctaggactacaggcgtgggccaccacacctggctaatttttttgtactttagtagagatggggtttcaccatgttgcccaggctggtctcagactcctgagctcagacagtccacccatctcggcctcccaaagtgttaagattataggtgtgagcctccatgcctggccaaagaatggattttttctttgctgtgatttatagaccagtgaagcagcgttacagcgtgaggaacagcgtcagccctccccccacggtctcggagctctgcgccctcctggtcttcctgctggatgtcattcctttggtgagtgctggggaagggacatctcaacgcctgctattatttacattcttactggtggtgatggcctgctttatcaacctcacattactgaaaatgttttacataaatatgcaacactgttttgatgtttgttttggcataaaagatatagctggatgtaatctcttaaatttttaatgtcttatttaaaaggggctataacttttgggccagttgtaagtgggcaaagctgaagttaggtcaaccagctgaagaactgggtatcattcccgtactacagttactttagggaaagagtcaatacatttcctagttaaaattgtgctgttggctaattttctcaaaggaaactaatttccttaatgtagaaacgtgccaattttattttttattagaaagtgtaaagccacttgcaaggagaggagtaacatccttgatttgtctagatcaaattgaaataccgagcctagctctgtggtatgcgctcgtaattcccagctactcaggaggctgagattggagcattgcttgagcccaggaatttgagaccagcctggacagcataacatgatccagtctcaaacaaaaacaatagaaatgttcttttcttttctctgtctctctctctctttttttttttttctcctgtgacagagttttgctcttgttgtccaggctggagtgcaatggtgtgatctcggctcactgcaacctccgcctctggggttcaagtgattctcctgcctcggcctcccaggtagctgggattacaggcacctgccactacgcccagctaattttttgtatttttagtagagacagggtttcaccatattggccaagctggtcttgaactcctgacctcaggcgatccaccagcctcggcctcccaaagtgctgggattacagatgtgagccaccatgcccatcctcttttctcttttttgagatagagcctcactgtcacccaggctggagtgcagtggcatgatctcagctcactgtagcctcatcctcccaggctcaagcaatcctcccacctcagcctcccaagtgtctgagaccacaggcatgtgccaccacatctggatagttttagtattttttgtagagatggggtctcactgtgttgcccaggctggtctcgaactcctgagctcaagcaatctccctgcatcagcctcccaaggtgctggctgggattataggcatgagccactacgcctagtcttcttttgttttctgatttgaaaattaatatggtatggtggctcacgtctgtaatcccagcactttgggaggccgaggtgggcggatcacaaggtcaggagattgagaccaccctggctaacacggtgaaaccccgtctctactaaaaaaaatacaaaaagttagccgggtgtggtggcgggcgcctgtagtcccagctactcaggaggctgaggcaggagaatggtgtgaacctgggaggcagagcttgcagtgagccgagatcacaccactgcactccagcctgggtgacagagtgagacttcatctcaaaaaaataaataaataaataaataaaataaaataaaataaaaaagaaaattaatgtgggtcaggcacggtggctcacgcctgtaattccagcactttgggaggccaaggtggatggatcacaaagtcaggagatcgagaccatcctggctaacacggtgaaaccccatctctactaaacatacaaaaaattagccgggcgtggtggtgggcacctgtagtcccagctgctcgggaggctgaggcaggagaatggcgtgaacccgggaggctgagcttgcagtgagccgagatcgcgacactgcactccagcctgggctacagagcaagactctgtcaaaaaaaaagaaagaaagaaagaaagaaaattagtgtgaaatttatgccctaaaaaattgaattagatgccattttgagatgcattgtttttctgattgtgaaccaacattgtggggttaacctacacgtttatttcacaggaactttactctgaggtgcaaacccagtatctccctcaggtgctcggctgcctggtgcagcctcttgctgaggacatggaggccttaagtttacctgaactcacgcatgccttgaagacgtgtttcaaggtgctcagcaaagtccagatgcctccttcctacctcgacacggagtccaccagcggaacctcggtgtgtactctgaggggcagaaatggttctgggggctaaaagcagcttatgccttcctgggagtagaaagtctttagggttggttaggataggaataaagatgagaagatacccaggtgatatgtcaaatatgcttgtaaaaccctcactttaaaaggttttagcacctggcatggtacaatggctcacacctgtaataccaacactttcggaggctggggcaggaggattgcttgagcccaggagttcgagaccagcctgggcaacatagcaagccttcatctctctacaaaataaaaattaggccaagtacagtggcccacacctgtaatcccagcactttggcaagctgaggcgggtggatctcctgaagtcaggaattcaagaccagcccaaccaacatggcaaaaccccatctctattaaaaatacaaaaattagccaggcatggtggcacatgcctgtagtcccagttacttgggaggctgaggctggagaatctcttgaacctgggaggcggaggttgcagtgagccatcacgccactgcacttaagcctgggcaacagagcaagactccgtttcaaaaaaaaaaataaataaaaataagggctgggcgcggtggctcacgcctgtaatcccagcactttgggaggccgaggcgggcagatcatgaggtcaggagatcaagaccatcctggctaacatggtgaaaccctgcctctactaaaaatacaaaaaattagccgggtgcagtggcgggcgcctgtagtcccagctactcaggaggctgaggcaggagaacagcgtgaacccaggaggcagaccttgcagtgagccgagatagtgccactgcagtccagcctaggcgaaaaagtgagactctgtctcaaaataaataaataaaataaaataaaataaaataaaataaaataaaataaaataaaaaggcatggtggtgttcacctgtagttccatctactcaggaggctgaggtgggaggatcgcttgagcccaacaggttgaggctgcagtgagccatgattgcacggctgcactccagcctgagtgagagcaagaccctgtctctacaaaaaaaaatttttaagtttagcaccctttgtttcacccattctcatgctacttgcctgctctgtaactgcagttaatggttagatacagttaataactatgtaactacagttaatgggctagttataactagccctgcactgttttatgtgtgtgtttgtggcatgtgattttggttatttcgaatataagcgagatgaggtactggattagtttgctgggactgccataataaagtaccacagactgggtggcttccacaacagacacttgttttctcatggttttgaaggccagggcctgacacgaaggtgtcagcaaggttggcacctcctgagtgcactggggaaaaagagtctgtctcatgcctcccccgagcttctggtggtttgctggcaatattcagcattcctcggcttgtccaggcatcagcccagtctcggcctttatgttcacttggctgtcaacctgtgtgcatgtctgtctctgtgtccagatctctcctttttataaatccagtcctactggatttgggcccactctaatgatctcatcttaattggatcatctgcagagactctattttcaaattaaggtcacattcacaggtactgggagttaggacttcaacctatttttgggggacaccgttcaacccataacgtacactattctctgacttgctttaccttttttttttttttttttgagacagagtctctctctgtcgcccaggctggagtgcagtggcatgattttggctcactgcaacctccacctcatgggttcaagcgattctcatgcctcagcctcccaagtagctgggattacaggcacccaccaccatgcctggctaattttttgtatttttagtagagatggggtttcaccatgttggccatgctggtcttgagctcctgacctcaggagatccacccacctcatcctcccaaagtgctgggattacaggcatgagccaccacacctggccttattttatttcttcatacctttattttaccctcagctcagtttcctcattcatatttgttaatttgtcggaaacagttctcgctctgttgtccagagaattgtggcaggtgatccgcccgcctcagcctccctaagtgctgggattacaggcttgagccaccacgcctggcagaaacaattcttaaacaacttttttgaactctaaaggggttatatatttagacaaaaacacaagaaaaataggcccaaaagccagcctccccagagagcatgtgggtgtaccagcctcctctttgctacccaccgctctccttctcctgctttgggtgcctcctaaatttcattatacacttaacacagggattctctagtctggagagtgatgattttgaaaaacagaattgaaatacattcatgatttcaactgatacttaaatagcttggtgttaagagatgcacaattcacatctttttattttttacagagtccagtaaaaggtgaaaacggcaaaataattttggaaacaaaggcagtgattcccggtgacgaagatgcttcgtttccccctctgaagtctgaggacagtgggatcgggctcagtgcctcgtcaccggagctctctgagcacttgagggttcctcgagtttctctggaaagggacgacgtttggaagaagggcgggagcatgcagaggacgtttctttgcatccaagagctaatcgccaactttgccagcaagaacatttttggagtacagctgacagcgtcaggagaagaaagcaagtccgaggagcctgcagggaagagggacagggatgggacgcagagcctggcagccaatgattccagcaggaagaactcttgggagcccaagcccatcactgtgcctcagttcaagcagatgctgtcagacttgttcacagcacgagggtctccattcaagacaaaaagttcagagtcaccatcgtcttcgcccagcagccctgccaggaaaaacgggggagaatgggatgttgagaaggtggtcattgacctggggggttccagggaggaacgcagggaggcctttgccgccgcctgccacctgctgctggattgtgccactttccctgtctacctgtccgaggaagagaccgagcagctctgtgcaacgctcttccagctgccaggtgagaggcagccctgccgaagtccctctttgggaatcatacgatgaggcgattgacgtgggtggaatatcccctatccacaatgctagggaccaaatgtattttggatttcggacttttttcagatttttggaatatttgccttacacttaccgattcagcattcctaatccagaaatccaaaatccaagagctccagtgactgtttccttcgagcatcatgtcagtgctaataaggtttcaggttttggatttggaattttcagattagagattctcaacctatatttaaagactagctcaaattgtgtaagccaagaaggtgctattggcctcatttgttcccttcctcatttgtaattagtacatttttgacttgtgtctcaccacatggcaaagtggtaagggtggggcctatgtttttaaaccctgggtgtccagcacagcccatcagaagacctagaacatgagtggcattcagtgatagtaaatagactatttcatgatgcctgttgataaagttttttttgtgttgggtttttttgttttttttttttttttgagacagggtctggctctgttgcccaggctggagtgtggtgacaccaactcagctcactgcaacctccgcctcctgggttcaagtgattcttctgcctcagcttccccagtagctgggactacaggcacgtgccactacgcccagctaattttttttttttttttttttgagacagcgtcttgctctgtcgccaggctggagtgcagtggcgcgatcttggctcactacagcctccgcctcccgggttcaagtgattctcctacctcagcctcccaagtatctggggttacaggcacacgccaccacacccagctaatttttgtatttttagtagagacagggtttcaccatgttggccaggatggtctcaatcttttgacctcgcgatccacccgcctaggcctcccaaagtgctggggttacaggcgtgagccactgcacctggccccctaattttcatatttttagtagagatggggtttcaccatgttggccaggctggtctcaaactcctggcctcatatgatctgcccgccttggcctcccaaagtgctgggattacaggcatgagccaccgtgcctggccaatattttatatattggtttgctagggctcctctaacaaagtaccataaactgagaaatttgtctcatagttctggaagccagaagtccaagatcaaggtgtcagcagagccatactcctcctctgagaccctggatggaatactttttggcctcttcagcttctggtgctggccggcaacccttggagggctcctcaccttgcagctgcatcagtcccgtctctgcctttgtcttcacagggtgtcctctgtatgtcctgtcttcccttgacatgtccctcttacaaggacaccagtcatattggattagggcccaccctaacaacctcatcttaatttgattacctctgtaaggaccttatttccaaataagtctcaccagcgggaggttagcgcactgctgtccaggtggatttctcaggtaacttcccagatctagggtgctgtagaatctgcagactggggacccattctcacgtggttctgcttgtttctgcctctccggctggcttcctttcaggagccggtgattccagttttccatcttggctgaagtccctcatgactatttgctgctgtgtgactgactgctacctccagaacgtggccatttccactctgctggaagtgataaaccattcccagtccctggcgcttgtcattgaagacaagatgaaacgctataagagctctggacacaaccctttttttggcaagctgcagatggtgacggttcctcccattgctccagggatattgaaagtcattgcagagaaaacagatttctatcaggtatttcccactgggaacactcttcttatggcctccttctccccctgagcaaaactcagaaccgtattgctggggatgggggcagtggcccacttctctgagagtgatattctatagggcactgggcagaggcagtagcctttggtcttcctctcccagcatgtaactttcaccctccaggaaagctacagtgagagcaactggggccccagtattctgggcctgccaggactgagtggaacccctgcctgggagtggggtctgggtggaggcagggagcccatgactcctccactgcactcacctggatttagcctctgccacatccagcagaggggtgggaaggtgacgtgctggtggcctgcccctcccaggaggtgcaaaagcccttgactgggagctggggaaagagagcacccttttgcttggccacatgcaccagagtggatagtgacgtttccatggagctaagctggggaaggaaggagatgatgagcaggtcatggctcaagtgccatgactcttgctgctttgaccgaaatgtcgtaggttttccggaataaatgtttctttatttcctgaatgtcctttggataatttccagactctaaatggttggttgttgttggttttaaaataattttcaccagttatggttgtgttgcttgggagagggtctgtctgtggaactcctcacaccgctcagctttggttccatgtgggacaccatctacggtgtcaggtcctgggggagcttttacttaattgctcattgactttttttgttgttgttgttgagacggagtcccgctctgtcacccaggctggagtgcagtggcacgatctcggctcactgcaacctctgcctcccatgttcaagcaattctcctgcctcagcctcccgagtagctgggactacaggcacctgccaccacacctggctaatttttgtatttttagtagagatggggttttaccgcattggccaggctggtctcaaactcctgacctcaggagtttgggaggcccgcctcagcctcccaaagtgccagaattataggtgtgagccaccgtgcccagctgcttattgacttttgtaccacatttcttcttcctgctagagttgagtcacattagatcttgaatagacagaacttgaaaccaggactggaaccgctataagcagcagtgattaagcaagtgtcatcttggccctacatagatcagagatcagaaaatttggcatatttacactatatataggcacaggggagaaaaaagaagaaagaattgagatcatgaatctttggaaaggtactcatagaataaaagtggcagcattaaatacattccttttattttggggcagtgagggaagcttttccaagttcttactgaagccttgatttttactttcattttcatgtagtacatattcaagtacttaccatttgcctggcactagagcatacttttcttttttttttttccttgagacagagtcttgctctgttgcccaggctggagtgcaatggcatgatcttggcctctgcctcctgaattcaagcgattcccctgcctcagcttccctggtagctgggactacagatgtgcgccctcacacctggctaatttttgtatttttagtagagacggggttttaccatattggccacgctggtctcaaactcctgacttcaagtgatcctcccacctcagcctcccaaagtgccttacaggcgtgagccaccgcacccggccaagagcatactttttttattgacatgtaatattgtatatatatatgggtacaatttgatattctgacacatttatacattgtatgatgatcaaatcatggtaattagcatacccatcaccttaagcatttatcatttctttgttgtgaaaacattcagaaccctctcttctagcaatttgaaatacacaatgcattattgttagcagtagtcaccctactgtgcagtagagtaccaagatttattccttggagcacacttttatgtactgtacagttcttgagagttgaggacagcggcagctagtgcctgtccctgttgcagatgctggaactagagacacagcaaccttacccatagccaggacgtgcccccaattctcagactccagacagggctgttgtctgatctttcagcctttttttaatcctgcgggaacagctcacataccagagttcctgcttcccacagtgcaaacaagaaaaggtcagatagcccaagggtgccctgacctttcttatcaggtagtgttggcagatttcagataactaagacaacacccagaacagaggagtagagtaaggtttaaacatgtgaaggaaggcccggctcggtggctcacgcctgtaatcccagcatccagcactttaggaggctgagggctgcttgcttgagctcaggagttcgagaccagtctggccaacacggcaaaatcccatgtctaaaaaaaaaaaatacaaaaattaacctggcatggtggcacacacctgtagtcccagctacttgggaggctgaggtgggaggatcacttgagccaaggaggcagaggttgcagtgagttgacatcgtgccactgcactccagcctggggcacatagtgagaccctgcctcaaaaaaatatatatgagggagtaggtatggatttgtgatcggcatcaactctcaaaaaccttgcaaaaaaattttttaaaccttccggaagggagtctcttgcatatatatttgccatagtgacagcaaggaagtcggggggggggcggtctacgtagtcaaaaagttatatatcagaattcaattgtaatgtgattgttggaaatcactttcccttagagaaaaagtaacaaaataatggttaggagtttgagccagtcagtggttaacttgatctatgcagagaaagacggttttgttgagtagaaataaatgggccaaagaagttatttgatctaagttatgcctaaaatactccagtctatgagatataaacttcatatagtctatgaagtataagaatgtctttagaaatttagaaatttccctcccggaagtggggaccagccctccttctgggtctcacccttgttggggcaggcacactggctcctgctccctgccacttggcaaggggctgtagccctttgcagaccatgcatgtttaatgagctcagttcagggctgggaagatggaggacacgatttgggggtataatagtgttttgaaagtgaggcaggcacctgccacagcgttgtgcagggaaaagggaagagtcaagttagtggaattaaagctggtaggcgtggctctttatccatgctgcgtggtaaccaattcgagcagaccccagaggtgaccaagtgctgtggagctgaaccccagaatgagtgatcttgacaaccactgtaaattcaccaaactccccagagggtacatctgtgcattccccagtgcctgctcggcacctgcctgttgaaagaatgcttcaacccctttggtccagtttccagttaattctctttctgaaagtaatgttgaggttgaggcaagagctgcagtgttcttagtcggccagaaacctccaggtttgacctcctataacattgcctgctgcctggatgactttggtgggtttttcctttttttcttttttctttttctttttctttttttttttttttttgagacagagtctcactctattgcccaggctggagtgtagttgcatgatctcaggatctcagctcactgcaacctccgcctcctggattcaagtgattctcctgcctcaccctcccaagtagctgggattacaggtgcccgccgccacacctggctaatttttgtatttttagtagagttggggttttgccatgttgaccaggctggtcttgaactcctgacctcaggtgatctgccccacttcgacctcccaaagtgctgggattacaggcatgagccaccgctcccagcctttggtaggtttcttgctttatttgttggtgatttgtctctgagcatggaggattctcacatggcaagtataggtgagatccagtatgtcggggctgggactgactgagtgaggatgtgagcggatgttgcctgtgttgacctggtcccccaccgcctgccttttccttgtcccagagggtggctcgtgtgctttggaatcagctgaacaaagagacccgggagcatcacgtcacctgcgtagaattgttctaccggctgcactgcctggcccctacggccaacatctgcgaggacatcatctgccatgccctcctggaccctgacaaggtgagcctttctggccgccacctccatcctgcagcaccccggcccctgctgtacgtgcccttagccaactgacatccattcggtcgaagtctttctggggctgagtggacatcgtgattaataaaataagcagaggtgttctaggatttcagtactggaaggccactagaagcatgagccattctttttacagccctggaaatgtggtttgtgaccatattgaggctcaccagggaaacctgcccaaacttgctggaaggacttgcagggcttctgcaggtgttggcaaaataggcagttgtagggaatttattgtccctttaagaacttattgaagcagggcgtggtggctcacacccgtaatcccagcattttgggaggctgaggtgggagaaattgaggccaggagttcaagacctgcctgggcaacatagtgagatccatctctaccaaaaataaataaataaataaggccaggtgcagtgactcacgcctgtaattccagcactttgggaggccaaagcaggcggatcacctgaggtcaggagtttgagaccagcctgggcaacatggtgaaaccctgtctgtactaaaaatacaatattagccgggcatggtggcacatgcctgtaatcccagctactcgggaggctgaggcaggagaaccacttgaatctgggaggcggaggttgcggtgagccgagatcgcgccactgcactctggtttgggtgacagagcaagactccgtctcaaaaaataaataaataaaaataataataaaccaatttttttaaaagaatatattttattgagaatttatcgtcctgggtctcctttgcagtctgttgtgtctcctcgttctttaagacacttgggcctgacacttgcaaggaagccatgctcctttgtgttttcctttggctgcagaccacaggggtgaccctggactctaatactgagttctgaatgtgccgctgtgttaaagtgaacaatcagagagagaggatgcaggttctccttttccttctggccgaatcagtcaaaggagaatgcagcgtctttgctgtggttgctgtcagttctgctgaagtctttgatctattgtttaaatggggtttatggtgactgaagacagtggtcagttacaaaaccaagttcctcactcccatgtatctcctcatcaagggaacaaggctggaagctctgtttagattttccgtgatctggcatctgacaagagagatccaaggcagtcgagtaacatctcacaatcgctcctttgataggtgaggcggccttcgttatgatctaccgttaactcacgaggaaactccacagaggtgcctgcccaacgtgtggggctggggagggagaggagcgtgcagttgaaaacatgaacccatatgaccgggtgtggtggctcacgcctgtaatcccagccctttgggaagccgaggcgggcagatcacttgaggcctggagttagagaccagcctggccaacatggtgaaaccccatctctaccaaaaatacaaaaattagctgggcgtggtggtgggcacctgtaatcccagctacttgggatggtgaggcagtagaatcacttgaacccgggaggcaaaggttgcagtgagccgagactgcgccactccactccagcctgggtgacaagagcgaaactccatctcaaacaaagaaaagctgacccctgcacatgacccctccgagcacagccagtggttcccataaacccctaagtgaatttaggccagacacatgtgaacacatgttaggaattttcttaatttggttgggatgtgaggaatcctggcatgccccgggatcacctgtgcagcttttacggcatgcccctatgaggggactttgcagggaggtcagatggcctagacctcccctggagcagtgaccatacttggtgtgtgtgcttgtcccatcactgtctcatgcttaagaggtgaacttgattgcagcccattgtattccacattgtttttcccgagtgcctctgaaactctaggtgtgaggccaggcactcggccttagagacaccagctgattctgatgcctgaggcccaggcccagactcagatatataacccatttggggtgaggcctgagcattgggattttaaatgctcccactggtgattccaacgcgaaaccaaagttgagtccccattgtgctcatctacttgggtctggaagtccagcttgggtggaggtcctagggtacctgtgttgggtgacgccctatgcccagtgtctgccacggtgcctggcgcacaggggtggctgcgagtgaactcactggtgtgtttcccactgcaggtccttgtttgtcgtgctggacagcctggcctgcacggatggtgccatcggtgcggcagcccagggctggctggtgcgtgcgctctccctcggggacgtggctcgcatcctcgaacccgtgctcctgctgctgctgcagccaaaaacccagagaacctccatccactgcctcaagcaggagaactcggccggtgagcagcctgcacaggacccgagggtgagggaggaatgggtggggggactggacctcagcagtgatagctgagagactgaggcccactagggggttttgttagatgcaaatggtactttgtaaattgtgaggacttcggcaatttaaggacgtagtgatctagcatttagaactattagggagtgggtttgctgttttcactgaaaaaccagattgttttgttattaaaaaaggaaagttggccaggcacggtggctcacaactgtaatcctagcattttgggaggctgaggcaggtggatcacctgaggtcaggagttcaagaccagcctggccaatatggtgaaaccccgtctctactaaaaatacaaaaattagccgggcgtggtggtacatgcctgtaatcccagctactcaggaggctgaggcaggagaatctctcgaacccaggaggtagagattgcagtgagctgagatggtgccactgcactccagcctgggtgacagagagagactgtcattcataaatacataaataaataaataaaataacttatttgtgaaccttcaactacaaggtaagtggtttattttctatctgtgctctaagattcttttagactataaaatcttgttaatcagattatcagaaatgaagaagaaataaacctttcagttcagagaacttccagaggcatctttaacacaaacataaaagaatataggtagaaattaggaaagaaaagaaaaactaaataagcctgatgagtcaattaaacttcagtgattaatatctaatgcattttatgaactaacattacttcctacaatagctgtatttaatgacttcacaattttctaagggatggtttgcaaactttgagtgagtttgtttagcttgaggcagaaatttaaaaataataataagaagaagtactgcattcattcattccaagaaaagtaacagacaaggctataagaaggttgtagtgacctagtctaagaagtaaaaaccaaggcccagaatgtggcaagacaagggttaaaaagtaaagaagggctggacggtggctcacccctgtaatcccagcactttgggaggctgaggcaggcagatcgtgaggtcaagagatcgagaccatcctggctaacacggtgaaaccccatctctactaaaaatacaaaaaataagccaggcatggtggcaggggcctgtaatcccagctactcgggaggctgaggcaggagaatggcatgaacccaggaggcagaggttgcagtgagccaagatcacaccactgcactccagcctgggcaaaagagtgagactccatctcaaaaaaaaaagaaagaaaagaagaacaagttttcctctgcctagcaagctcacttcaaagacagttataagctaacgctgttcgagaagttgaaaccaaaggaataagctccagacacccccctctccagatcaagggtgaaggaaaaaaaggacaaatgtctgtatttagccagttcttgttttttcttatcctgtatttatcttaatcttttttttttttttttttttttgagacagagtctcgctctgtcacccaagctggagtgcagtggtgcaatctcggctcactgcaacctccgcctcccgggttcaagtgattctcctgcctcagcctcctgagtagctgggattacaggcatgcaccaccatgcctggctaatttttttttctttctttctttttttttttttttttttgtatttttagtagagacagggtttcaccatgttggtcaggctggtctcgaactcctgaccccaaatgatcctcccgcctcagcctcctaaattgctgggattacaggcatgagccaccacgcctggctatctcaatcttatcttacagagaaaagcaacccattagctaagtaagcagaggtgtgtgaaatggtttcctgtctttataaggctcctggcctaaacctctaacctctggttttcctttaggggaaaagctggctgccctatcaaataggaaacattttattgttccacattgtaagaaagtaaaactgaaagaagtgtaaacaaagaaccttcttaaaagtttggctactattcatggcagctacattttttagtatttctttttctttctgttttaagaggaaagctctatctccacagttccttgggcattattattattattattattattattattattattattgaagaagagtctcactctgttgcccaggctggagtacagtggtgtgatcccaagtcactgcagtctttgcctcccaggttcaagcaattctcctgcctcagcctcccaagtagctgggattacaggcgctggccaccacagccaactaattttttgtatttttagtggagacggggtttcaccatgttagccaggttaggtctctaactcctgacctcaagtgatccatgcgcctctacctcccaaagcgctgggattacaggtgtgagccaccatgcccagccttagttttggtatttttagtagagatgggtgtttcgccatgttggctagactggtcttgaactcctgagctcaagtgttccacccgcctcaaccttccaaaatgctgggattacaggcatgagctactacgcctggccttccttgggctttaaaagttccccagcactaccttgctgcttcctctaatctgtgtttcctgctgaccacagaaatggtctgctacctccgaataggagagaacatctttgctctgccattttctttctctgaaaaaaatgataagtgtcctgcttaccccaccctatttctgtaatcctgtagaaatctatttttaaaatactgctatgcacttcaagcagctcatcaatttctgatgtctgattcttcttcatttcttgatcttgcttaatgtccatggcatagagtttttttaaagctcttttgtgtgcctttatcttgtttgatcatcctaaaaaccttatgagaatgacagatttcttcttttcttttttttttttttttgagatggagtctcactctgtggcccaggctggagtgcagtggcgcaatcttggttcattgcaacctctgccttccaggttcaagccattcgcctgcctcagactcctgagtagctggcattacaggcacgcgccgccacgcccagctaatttttgtatttttagtagagatggggtttcgccatgttggccagactggtcttgaactcctggccccaagtgatccgcccacctcagcctcccaaagtgctagaattacaggtatgagctaccatgcccggctcatggcatagatttattgaacactgcttatttaaaatgtttggcaatatcaaagacttttgactcactaatttttttttccttttcttcttttttttttttttttaaataggcagtggtcagtggcctatttgacttctcctaaaaaagacttcaatattttaaagtgtcatacgttttctgattatagaagtactaacatggttagttttaaaatggaaataatgaggacataaaaacctaagtggaagtcctttgtaatgctagttgatagaactagggattgttaatggcttgcaggtagtctcccagactttcctagtggctgtgtattatacatactctctcctaactgggctcattctacataatactcttctgctgcttgattttttttttcctttctttttagagacaggggtctcactctgttgcccaagctggagtgcagtgacaccatcatagctcactgcagtctcgaactcctgggctcaagagaccctcctgcctcagcctcccgagtagctaggactacaagtgtgtgtcaccatacctagatagcttttaaattttttctagagatggagtttttccatgttgcccaggctggtttggaactcttgggatcaagcaatcctcctaccttggccttggcctcccaaacaatcctcctaccttggtctcccacagtattgggattacaggcataattcactgtacctggcctgatttttcctttcctttttttttttttttttttttttttgagacagagtctcactctgttgcctagtctggagtgtagtggcatgatttcagctcactgcaacttccatctttcaggttcaagtgattctcctgtctcagtctcccacgctgggactatgggcacgcaccaccacgtccagctaatttttgtatttttagtagatggagtttctccatgttggccaggctggtctcaaactcctgacctcaggtgatctgtcctcctaggcctcccaaagtgctgggattacaggcatgagccaccatgccaccacacccagcctccagtttgtctttatacacatgtgacatttcggtgaatatccacatccttatggctttgaaagtcttctgctgacatttctgcaggatacatttctgtttttttgttttttaagacggagtttcgctcttgttgcccaggctggagttcagtggcacaatttcagctcactgcaacctctgcctcctgggttcaaatgattctcctgcctcagcctcccgagtagctggaattacaagcacctgccaccacgcccagctaactttttgtatttttagtagagacagggtttcaccattttggcgaggctgatctcgaactcctgacctccggtgatctacctgccttggcctcccaattgctgggattacaggtgtgagccactgcacccggccaggagacatttcttgaaagagaattcctaggaaaaaataatacgtatttttaaaaattgctcccctccaaaaaattaaaatacttaagtttactataacaatgtaactaaatgatcccatccttgaacattctgtaaaacctatccaccttcctttgtctacttttgtctgtaatgtaaaccggactctggtggtggtgtttcatgtgagaattttaggaatattgatctttctgtctggctttaagacaaagaccgccctacagctaatgtatcatagctgacccttctgtctaaagtcatttgtcatcttgtaattttcagatgacttgcaccgttggtttaacaggaagaaaacctctttcagagaggcatgcgcagtgcccgagcctcaggagagcggctctgaagagcacctgcctctgagccagttcaccacagtggaccgtgaagccatttgggccgaagtggagaaggagcccgagaagtacccgctgcgaggcgagctgagcgaggaagagctgccctactacgtggagcttccagacaggacggcccacggcgccccggacagcagcgagcacaccgagtctgcagatacaagctcctgccacacggacagcgagaacacgtcctccttctcctccccttcccacgacctgcaggagctgagcaacgaagagaactgctgtgcacccatccccatggggggcagggcgtaccccaagcgctcggccctgctggcggccttccagtcagaaagcttcaaggctggggccaagttaagcctggtgcgggtggactcggacaagacgcaggcttctgagtcgttctccagcgacgaggaggcggacttggagctccaggccctcaccacatccaggctgctaaagcagcagcgggaaaggcaggaggccgtcgaggccttgttcaagcacatcctgctctacctgcagccctacgactctcggcgggtcctctatgccttctcggtgctggaggctgtgctcaaaaccaaccctaaggaattcatcgaggctgtgtccaggactagcatggataccagctccaccgcgcacctcaacctcatctccaacctcctcgctcgccaccaggaggccctcattggccagagtttctacggaaagctccagacccaggtccccaacgtgtgcccccactctctgctcctggagctgctcacctacctctgcctgagcttcctgcgctcctactacccttgctatttgaaggtctcgcaccgagacattctcggcaaccgggacgtgcaggtcaaaagtgtcgaggttttgatcaggataatgatgcagctggtctcagtggccaagtcttcggaagggaagaacgtggagttcatccacagcttgctgcagaggtgcaaagttcaggagtttgtcctgctctccctgtcggcgtccatgtacacgagccagaagcgctacgggctggccaccgcccaccacggcagggccctgccagaggacagcctctttgaggagagtctcattaacttgggtcaggaccagatctggagtgagcacccgctgcagattgagctgctgaagctgctgcaggtgctgattgtcttggaacaccacctgggtcgggcccatgaggaggcggaaaaccagcccgacctgtcccgggagtggcagagagccctgaacttccagcaggccatcagcgccctgcagtacgtgcagccccaccccctcacctcccagggtcttctggtctctgcggtggtgaggggtctgcagcccgcctacggttacggcatgcatccggcctgggtgagcttggtcacgcattccttgccctacttcggaaagtccctgggctggacggtgacaccctttgttgtccagatttgcaaaaacttggatgacttggtcaagcagtatgaaagcgaatctgtgaagctctctgtcaggtgcgttacgctccttgtgacatctttattgctttagtgatggtttttataacgaatgactgttttgccacggatgtggatgtcggttggaggataatttcatcccaatgagaagcctgtttagcattatcaagaggggtaacaagcaactaaatgttctgatccattatgttatgttatgttatgttatgttatgttatgttatgttatgttatgttatttttgagacagagtctctgtcacccaggctggagtgcagtggcatgacctcagctcactgcaacctctgcctcccaggttcaaacaattctcctgtctcagcctcccgagtagctgggattacaggtgcctaccgccacatctggctaattttttgtattttagtagacacggggtttcaccgtgttgcccatgctggtcttgaactcctgagctcaggcaatccccctgcctcggcctcccaaagtgctggggtgctagagggagccactgcgcccagccctgatcctttatttcaaatccgcacaggtacccagtctagctcagtgttgcagggcatgtcagctactctctactatttttgcaaaacagaaataaaaatgtgaatcatcttcacagaaattctaaaacattgaaaccatttttccaaagtgactatatgaatgtaaaatcacacaaaggatggttaacattattataatgatattctatgacgagagctccagtttatttgggatggtgatctctccctagttcctgtgtttatatataggattagaaacccttatggcctcattctttaaaaattctcaaaccagtttctcttttcttcaccacagcacaacctccaagagggaaaacatttctccagattatccactcacccttctagaaggtctaacgaccattagtcatttttgtcttttggaacaagccaaccaaaacaaaaaggtaaattttttttttttcctgagttcaaggcaattttcatgtattgttttgtctttgggctatgactgtttcaaataagtaacgtatgtatgtaatgtctgtaactaatatgcgtatggaggtgatgcaaatgtgaatgcaaatattacataagtcacgtacacacgtatgcaaatgcatgtgtgttagcaatgcaagtgcctacgcaaatgcatatgcaaatgcatgtatataattaacgcaaatgcataagtatgtatgtcagccatgcaaacatagttttcttcctgctggcactccctgtgccagcccttggcccattgttccatcagtagcctgtgagataacttataaagccacttgtttgattttaggcttatagtcatctttttccatgtattttttacttgctatcatggtgttcatgaaatctgagtaggcagacattttagctgttggttattctaccctgtagaataccctgggattaagtcttagaatacatctaacactttggttgaatggttgaaaagtttgtaatttagaacatcagactcacagctgtctctgtgaaagagaaccatgggttgaaatgcacagagaagcttattgctcccagaccaccacatgtatgagttgcttagaagagagtccaacagcccagacctaatcccgctagcactgctgccctcgtgggaagaaaaaccattccacagacacagcctgcctcatgtattcattttaatttttagaccatggctgcaggtgatcctgccaacttgaggaatgccagaaatgccattttggaagagctgcctcgaactgttaacaccatggcccttctctggaatgttctcagaaaggaggagactcaaaagagacctgtcgatctcctaggggccacgaagggatcctcttccgtttactttaaaaccaccaaagtaagaggatgtctctgtagttctgtcatttacttggtcttgtattgttccacccaaaataaatgtgtataggaaagtgtgcatgataaacagatgtgctcaatgaaacccaagtcagagatcagaagtagaaatctctagttcatttgttatcagtaagtttcctatacctgaaatggaggagtctgagtggtttcagcctgttttcttcttattttccattcaccttattttgtagttaaaaataaagtcttggccgggcatggtagctcacacctgtaatcccagcactttgggaggccaaggcggatggatctcctgaggtcaggagttcaagaacagcctggccaacatggtgaaaccccatctctactaaaaatacaaaaattagccaggtgtggtagcacgtgtctgtaatcccagctactcaggaggccgaggcaggaaaatcgctggaacctgggaggcggaggttgcagtgagccaagattgcaccactgcaccccagcctgggcaacagagcaaaaccccatctcaaaaaaaaataaaaataattaaaataaataaagtctctagagctaggcgcggtggctcatgcttgtaatcccagcactttgggaggccaagatggggtggattgcttgagctcaggagttcaagaccagcctggccaacatggcgaaaccccatctctacaaaaaatacaaaaattagctgggtatggtggcaggcacctgtagtccgagctactcaggaggccgaggcaagaggattgcttgagcctgggaggtggaggttgaagtgagctgagatcacgccagtgcactcaagcctgggtgacagagtgagaccctgtctcaaaaacaatagtctctagtggttcaaagcggggatacctagatcctcacctctaaatgatctagagaccccagccttgagtctctaaagcatttctgcgagacagctcatctctgttctgcttttagcggtgcctgtcaaacatggccccatcagagtggaatgtcagggtgcctttgagttcttaaaccaaaaacgcacaactgtgaatatttatattatagtttagtctttggttttcagtgtctgcctcagaaggctgtaggcgcaggactcggtcgctcaccatctgtgttactgtgtgtggcatctcagaattatctgccacatctgacatcagttgagagcccccaggtgccagatgtggccgcagggatgagccttgccatcctgcatttaggtaccacggtgcgttgttggcctccagacattctgtcggttcctagggtgccaagggaattctgtatttcaagctcctataagaacctgctcttaaaaagattcagaaaaccttttttctcactcagaaaaaaagattttctaaaccttttttaggggagcttcctgtagcactcagcctctctgagcctccatttcctcgtctgttaaaccaggctgtggctagcatcctgtcctcatgggttgagggaaagagtaattacgataaaggccgatgctcattaggcacttaactcctagccctccctgaggaacccagggccggggagcgggaccccacattagtccctctagagcagaagccatggtggaaaagaggggacagctccattgctggctcagttgtatctaatgtgaaataaacatgggcggttgtcacaggaagcgctgggtaaatccgtctcttcgacagacattttgtgcctgctgccacgcaccaggctctcttgctttaccggtggacaagagagatgaagtccctgcccctgtggcagaggcagacattaactggcagtgtaataacgatgtgagcagggcttcaaagaaacacagggtttcctgagagtgtgtgaacaggaggcctggcctgacctggggttcctgaggcggcatggcttagctgaggccccaggcggagaggatttaactacggtgggcactgcaggctgagagagcggtaggatttacagagcgagaaacgtggcgggaacacagagaaattcataagtagcaaaacagagggtgctgagtgacatcaggaccatgttacaggtttaaattgattacctgataaaattagttaaatggtgcttatttctggaaattgagcaacaactttcctaatgaatataagcccttccgcagcagatggagtcaggctgaggctgtggggtttccagatggaagcagtgctgcaaagccttgcccggcttcctgcaagacccccactgtgctcacagcagcaagggtgatattcatcgtctcccgagatgctcctggccaatcgagctggccatccgtctctccaccttggctgctcactgccccttccccccgccggcatgacacgccaacatcacacatctagctccttgcggaaagggtttgattcctcccattgctgggatccacccatcagggaagcacctcagcacaacattgggcacaaacatgacagggtccttgctctcggtatggacagcagtggtggttcaatgtatatgatgccatagccccaatattactctgcagtaacttttttttccctattttctagaccataagacaaaaaattttagacttcttaaaccccttgacggcccatcttggggttcagttgacagcggctgttgcggcagtgtggagcagaaagaaagcccagcgtcacagtaagatgaaggtaaagtttaaaaagttacaggagtggttaaacttactgtgacaaagaaataccacagaatcatgtggaatcaaaggtgacattggaagccagcatgggaaactattgagttgatttaatcattttatcttattttatttctttatctatttgagatggagtctctctcttttcacccaggctggagtgcagtggtgcgatcttggctcactgcaccctccacctcctgggttcaagtcattctcctgcctcagcctcccatgtaactggaattataggtgcccgccaccacacccggctaatttttgtattttttagtagagacagggtttcgccatgttggccaggctggtcttgaactcctgacctcaggtgacccacccacctcggcctcctaaagtgctgggattacaggcgtgagccaccacaccttgccgatttcatcatttgaaatgcatgagataatatagctgtgtctcagtacaagtagaatgtgtattgggcaggtagggaagagcgcacctgacttctgttttctaatttttctgtaatgagtatatagtacttgtgtttaatctttttaaatctaaaatacatataagagtatatataacatgaacatttttaaagaataaaaatggcacagtggctcacacctataatctcaacactttgggaggccaagacgggcagatcgcttgagtctaggagtttgagaccagcctgggcaatatggcaaaaaattagccgggcgtgctgttgtgcacctatagtcccagctactcaagaggctaaggtgggaggatcacttgagcctgggaggtggagggtgcagtgagccatgattgtgccactgcattccagcctgggcgacaaagcaagtccctatctaaaaaaaaaaaactttacctaagaacatgccacccatttggcttaagaaatggtcacttatcctagcactgtgggcctttttttatttgtagtaccatcttattgcttttttaatgtgtagaaatcacacttgttagctgggcatggtggtatgcgcctatagtcctagttacttgggaggctgagatggaaggatcacttgaagccaggaatatgaagctgcagtgagctacgattgtgccactgcactctagcctagacaacagagtgacacttcatgtaaaaaaaaaaaaaaaaaaggaaattacatttgtccatgataataaagaaaattgaaatcaccaatcatatttctatgcccaaagataatttctttttttttttttctattgagacagagcgatctcagctcactgcaacctctgcctcctgagtttaagcaattctcctgcctcagcctcctgagcagctgggattacaggtgcatgccaccacactcagctaatttttgtaattttagtaaagacggtttcaccatgttggccaggctggtctcaaactcctgacctcgtgatccgcctgcctcggcctcccaaggtgctgggattacaggcgtgagcccaaagataatatcagtttgtattttgcccgttctttatccacttgactggtccatgatgaagtcctgcaggggtcggcttacctttttcaacctcaatcctcttcctttgttccctcccacccctgctccatcccctgctcgggatctgctgctgcacctccttgacactcccccagtgctcagcctttgtggcagacatgggcgcctgttctctgaggaagagtcagtggtcagtgtccaaggccaccctcctgagcgcctgtcggctccttccctggtgaggaacctggtgctagttgtttttcttccaaatgcccatgaccagggtatgcagacttctgtcatcaaaaatatgcctcccataccagggctttccttccaaggctagcaaatgggagcctggtttatctgtttttacttcctgtcttcgtatttttgattccatctcttgtttccttcaaatttagtatatttgtttctaaaatgctttctactaaattcaaacataccactattacagccccatcatggcctgcaccttttattcctaatttgtatcaaattatgttgttcccctgggtggagcctttacctagttcaataggaaatgtttgtttaagagattaaaacaggccgggcgcggtggcggctcatgcctgtaatcccagcactttggaagaccgaggcgggcagatcacctgaggtcgggagtttgagaccagcctagccaacatggcgaaacctcatctctactaaaaatacaaaacttagctgggcgtggtggtggccaagatcgcaccactgcactccagcctgggtgacagagtgagaccgtgtttcaaaaaaaaaaaaaaagagatgaaaacagattgatttctccagggacgactactgtagaatacaataaggatgtgtcatccttatttttactttctctctataagctttcaaggaacttttttttttcttggcagattatcccaacggcaagtgcatcccagctaacccttgtcgacttggtgtgtgcactcagcaccctgcagactgacacgctgctgcacctggtgaaggaggtggtgaagaggccaccccaagtcaaagggggtgatgaggtgaggagcctggggaagcctctgggcttctgcagattagtgggtggcatttgtcataactctacttccttataaatcgtgtttgggagggaaggataggtaacaagagctagtgggaatgcttggggtagtgaagtggaggtgctgtttgctgtgctttgggggagacctatgaagatctggtgcttcttttttaagttgggaactgcctgaggtcaggggctctcattccttgtaccctgctgctgaggacactgcctggtacatgggttagcgccttctgggcaccaagtggaataaaatctttagaaagaggaaatggcacctgcctcaaggagctcgcagccataaagatgccaaagataaacaaaaccagactctagtgaaagatggtaaagacagatgtgattcaataaccactgcggtaagggaaagtgttgggttcagtttagatttgtgtggagatgactgggaaaggatgagggaggagggagggggaaggagcaggaagtttaaggagagttggagaagtagaaaattacaaaagagcaggtggggaggctgctcagtccatagatgtgattaggccatctgggtttgctaactggggcttatccaaatgaggctcctaccctcccacagaggctgggagatcgagactctgtctttcttgatgattctgtttcaaagggatggctcccaggtccttgagaaacacattcctaggttgtgggagacacatacacatctcaaagggacagagaaagtatttatcattgtaaacttaaaagaaaatgctctaagaaagggaggtcaggggtctctctgcaggtgttggcaggaacaaacagtaaattatttggcaaccttgagctttctcggacaagtgtttgaagaggactggtgtccccatcctagggatccatgctagtgttgtttggggctgtgggggtggacagaatcatttgtcaagcagagggctcagaggagcctagctagaatcagctcaaggagagagtctttgtcaagggcaaattaaaatttgtgtaacttttttttttttttttttttgagacacagtttcactctgtcacccaggctggagtgcagtggtgcgatctcagctcattgcaacctccacctcctgggctcaagtgattcttgtgcctcagcctcctgggtagctgggagtacaggtgcatgctatcactcctggctaacttttggttttgttttgttttgtttagttttttcgagatgaagtctcactttgtcgcccaggctggagtacagtggtgcaatctcagcccactgcaaccccgcccctggggttcaagtgattcttgtgtctcagcttcctgagtagctgggattacaggtgcgcaccaccaagcccggctaatttttgtatttttttttttcttttagtagagacgggattttgctatgttggccagactggtcttgaactccacttgccttggcctcccgaagtcctgggattacaggcgtgagccaccgtgcccggccaaaatttgcataattttttttaaaacttttttttttttaagacaggatctcactgtcacccaggctgcagtgcagtggcacaatcacagctcaccatagcctcgacctccccaggctcaaatgatcttcccaaatagctgagaccacacatgcacaccaccacacctggctaatttttatattttttgtagtgacggggtttgccacattgcccaggctggtctggaactcctaggctcaagcaatcctcctgcctcggcctcccaaagtgctgggattacgggcgagagccaccatgcctggctgcataattttttataaaggtagaaaataaatgtcagagaacataactaatgatagacactctgagaaagaggagatttcatctggctgctgtgaaacagaaaccttcagggtgatgtcattgaaccgagaagttccttgtaatttttctgctcaatttcattacagcagcctggagggcccatgttgtctagagagcttcttcaattatacacggtggatttaaaacagggcaagctgtgtggtttaatatttgcattcccttagagtcttctatttctgtttttaccaaagcagtcttcatcattgaaagcagcagagctgttttgctcttaattaactaatttaataaaaaccagggatttatttcaatcttgaaataattgccttctgtcgaacagtttaaaatcatacagttagcaaaaatttaagaataatctaaatgaaaattaggggggccgggcatggtggctcatgcctgtagtcttagcactttagtccaggagttcgagaccagcctgggcaatgtagggagacatcatctctacagtaaatttaaaaattagctgggtgtggtagtgcacacctgtagtcccagccacttgggaggctgagacaggaggatcagttgagcacaggagttcgaggttgcagtgagctatgattgagccactgcactccagcctgggtgacagagtgagaccctgtccaaaaaaaagaaaattcgtgcaatggaaaaagtgattattaaaaaatatagctatacttgaacaggtgtttgtgtaccgatgttcatagcagcattattcacagcagccaaaaggtggacgcaatccctgtgtgtctcagtgggtgtgcggataacaaagtgagatctgtgcgtgcagcgcgttagtactcagcctcgagaggaatgaaattctgacacgtgctacacaacatggatgtcagatcctcaacatggatgaaccttgaagacattaagttgaatgaaataagccagtcacaagaggactaacacagttctatatctggaaaaaaaaaaacaactgtgtcctcactcaacaacataacaatcaacacagaagacttctcttaccccaaatatgcggggagttctccccaccagcaagcaagcaattgattccgcagtggacaccagttgggtgtcctccaattcaattcctactctatctgcttggagatagtgtcagatcccacagggtgagggctcagtccccaagagcacccttcacttcagacaccagtcacaagtctgggcctctggaacttctgactgactagcttcaagttgggattcccacgaaccccctctttgggttcagttaatttgtcagagcagctcccagaactccagaaacacgtttactggtttattataaaggctactactgaggatacaaatgaagggatgcgtagggcaaggtatgggggaagaggtgcagagctcctgtgccctccgtgggcacagaaccttcatgtgctctgctctctggaagctcaccaaacccagtcctcttgggccttttatggaaacttcattggatgggtatgactaaagcatggacaaccgtgtcgaagtgtgattggacaaaaagagtgtgatctaatacttaatacagtgactggggaaacctagcagggcctgcctgttcagattcttcttggcctgtctgcacagcactgcttcctccagggtgtgggacaggaccctctccagaatgagggtcttatgaaccgtagtcagattagagtcctgccttggggcaggtcaaaggagggcaggagttatgaaccaagaactgcagacaaacacgtaaaaacataggttgatacgtagatagatgatagatagatagatagatagatagatagatagatagatagatagaagtagttaggtaaatagatagatgtaggtaggtaggtagatgtaggtaggtaggtagagagatggatgtaggtaggtaggtaggtagatagatgtaggtaggtaggtagatgtaggtaggtaggtagagagatgtaggtaggtaggtaggtagatgtagggtaggtatgtagatagatgtaggtaggtaggtagatgtagataggtaggtaggtagagagatagatgtaggtagatgtagttaggtaggtaggtagatgtaggtaggtagatagatgtaggtacgtaggtagatagggagatagatgtaggtagatgtaggtaggtaggtagatgtaggtaggtaggtagatgtaggtaggtaggtagataggtagagagatagatgtagttagatgtaggtaggtagatagatgtaggtaggtaggtagatgtaggtagatagatagatagatgtaggtaggtagatagatattatgattttagagtgttaaagggtggctcactcctgtaatcccagcactttgggaagccgaagcagggggattgcttgagcccagaagtttaagaccagcctgggcaacaaagtaaaaccttgactctaaaaagaaaaaaaaaattagccaggcatggtatgcacctgtagcctcagctacttgggaggctgaggtgggagaatcacttgagccagggaagttgaagctgcattgagtcaagatcacgccactgcactccagtacagagcaagaccctgtctgaaaacaaaagaaagactttttttttttttcacatcagacaatgtgccgaccattgtaacaaagtttgagggtggcacatatcacgcatgtgcgtgaacacccaatcatcacactaatgaactgcagatgaatcggaagacttttttttcagccatttttttcagcctcacatatgacacggggcagccccctatagaaatgtccaggccccgagggcctggccgttgggcgtcacccagtcagttatcctccagctcctggtctcttccttcgttccagtgttaatcgacaatgctctatgtgcactgagtggtgtcgtggaggctaaatagtggaaaaagcaattcctgccctcagtcctcctatattctaggttggcaaagaagagagaagagaagagaagccatcctaaaaaataacagcactgcgaggccaggttatggagcgagctcagtcagtgcttaaggcttcgaatgtaaaaggacccggatgacttccacagtatttcttggggatctggcccaggtctcccaatcttccaagaacgtatggtcatcctgttgcctttcactgtttttttttttttttttttttgagacgaagtcttgctctgtcgcccaggctggcgcaatctcggctcactgcaagctccacctcccaggttcatgccattctcctgcctcagcctccctagtagctgggactacagtcgcccgccaccacgcccggctaattttttgtatttttagtagagacagggtttcaccgtgttagctaggatggtctcgatctcctgaccacgtgatccacccgcctcggcttcccaaagtgctgggattacaggcgtgagccactgcgcccgggcttttttttttttttctttttttttgagatggagtctcgctctgttgcctagcctagagtgcagtggcgtgatcttggttcactgcaacctctgcctcctgggttcaagcaattgtcctgcctctgcctcctgagtagctgggattacaggcttgcgccaccatgcccagttaatttttttgtatttttagtagagatggggttttgccatgttggccacgctggtcttgaatgcctgacctcaagtgatccacccgccttggcttcccaaacttccgggattataggtgtgagccaccgtgcctggcctcctttcattcttgtccataaatgttaggagtgggaatggtgctccacagggcggtctgtgctgctgcaggcttggtcgccgtagaaccaaggggttcttcgaggtcctgaagacagctctgcagaggctatgacagccagagcgagtgtgtttaggttgtattccttcacattacttgaatttctacaaatacctgcaatttctagtctttcctgggctataaaggaaccggattttatctagctgactgatttttggcggttcaaataacaaaactacattttgtggttagtttagttaattaatagctgcaaatagctttttacaagcaaggagggggtaaaatatgtgttttagaacttgtttccaagtagttccagccacagggtttttggggaagctgtctgagctgggcttggagtcatcttctaaactaagaactagaattttttggccgggtgcggtggttctacttgggaggctgaggcacgaggatcgcttgaacctgggaagcggaggttgcagtgagctgagattgcaccagtgtactccagcctgggcaacagagcaagactcttgtaaaaagaaaaaaaaaaaaggaaagaaggaatgcaaagaaagaaaaaggaaagggaagggaagggggaagggaaggggaagggaagggaggaagggagggaggaaggaaggaaggaaagaaagaaagaaagaaagaaagaaagaagaattagaattttttcttgcctcttggtaatcatatgcattcactggagtcaacactggccctagctttctgtttgggaagttcggttacagtgccaattttcccgaaatgcctgttgacgcctggaatgtaaagtaggtgcacagggtgggagatcactgtagaagtctaaggggatgtgaatgatttggggactcataggacacacttgttttaattgtacatgatgggcactatcatgtctgttgttatatctgaaagattctttagtcaaaaacctttgctttgttaggctatagatctgtttcattttgtatctgaattcttttagccttatttcccaccaactcggagtaattggttttactttcattttcagaaatcgcccctagtggacattcctgtgttgcagttttgctatgcttttctccaaaggtaatacagtcccccgtcctccaaaaacttccttaaatacagatgctattgcagtgagcatgcataataaatatctggttttatttctagactactagagagccattgttcagaaaatatcttaaagttgtcataatttcttcccaaggtattgatctatgcttttccttctccagagagttaacatcttaaaatctgtgcagcgtactttgaacactttatatgagcgaagctttatgtgaggcctgttaaactttaaaaggcttggatttgcattaaattgatacagaaaaagaaaaaaaccacatatagggaagtgttaaagacctcttttagaaaaaggagaaatgggccaggcgcggtggctcacacctgcaatcccagcactttgggaggtggaggcaggcggatcacttgaggccaggagtttgagaccagcctagtcaacatggtgaaaccctatctctactaaaaatacaaaaattagtccggcatggtggcgtgcgcctgtaatcccagctactcgggaggctgaggcaggagaattgcatgaacccaggaggcggaggttgcagcgagccaagacctcaccactgctctccagcctgggtgacagagcaaggctctgtctcaaaaaaaaaaaaaaaaaaaaggcaaaatgattgtttctggtggcgttctcagtgtgccttcccatgttttatgtggagaggtatctgctttgatttgctaagttaatatatgtattaggtgtctcagctaagagagcattaaaggggattccgcaggtttttccccatggatgaaaaagaagctttactggacctcattcagatcttacaatggctgcatcccaggtgcagctctgtgttgcagaaaatgagggtgaggtggctgggtgcggtggctcaacgcctgtaatcccagcactttgggaggctagagtgggtgagtcacttgaggccaggagtttgagaccagcctggccaacgtggtaaaaccctatgtctactaaaactacaaaaaattagccagggcttggtggcagcatgcctgtagtcccagctactcgggaagctgaggcaggtgaatcacttgaacccaggaggcagaggttgcagtgagctgagatcacaccactgcactccaggctgggggacagaatgagactctatctcaaaaaggaaaaaaaatgggggtggggagggtatagaccacttctcagggaagcctcactatgcctacatagccatcaggagtctcactgtaaataactccaacaaccaggcacaggctccttgattcacacagttaacattacatagttattcccactcaccacattctgaagttgcaggacggtaaattgaggcctcctggtagatgaccagggtggggttaaattcagaccacttcccttgtgagcatcattgttgttctttcctccaggagttaaagatgagccggtcacttccctcctatgacagcgaatatatattgcgttgctggcgaatgttgagtgtagtggcctgagggacagctgagctttcccaggagctgcaggttagatttggtcatcctccttttgcagaggagaaaccgcctaggtcacacaataggtagtaagttggagaaccaggacttggacctgggacactctgactgtagtctgagctttcactgcctggactgtgcttcctcgctttggagcggtgatctcagaatcctcatcctgagagctacagagcggggtaggccagtttcctggtgagtgtcctgggacctaatgctttgcagccttctgacaggtgatgctgtgttaccagccacttcagggaagcagaatattagcactagaaaggcctgagagatcagccgggcacggtggctcacgcttgtaatcccagcactttgggtgaccgaggcaagtggatttacttgaggccaggagttcaagaccagcctggccaacatggtgaaaccctactaatctctactaaaaatacaaaaaattagcccagtgtgttggcccgcgcctatactcccagcttgggaggctgaagaacgagaatcgcttaaacccggggggcagaggttgcagtgagctcagatcgtgccactgcactccagcctgggtgacagagcaagactctatcttaaaaaacaataataaaataaataaataaataaataaaataaaataaaataaaatagaagaaaggccgggcgcagtggctcacgcctgtaatcccagcactttgggaggccgaggcgggcggatcacctgaggtcgggagttcgagatcagcctgggcaacacggtgaaaccccgtcgctactaaaaatacaaaattagccgagcgtggtggcacatgcctgtaatcccagctattcgggaggctgaggcaggagaatcgcttgaacctgggaggcgaaggatgcagtgagccgagatcacgccattgcactccagcctgggcaacaaaagtaaatctccgtctcaccaaaaaaaaaaaaaaaaaaaggcctgagaggtcaaggtcgatcatctaatttaaggcttttattttagagacaaagaaaccaggagtatctcacctgccagcagtaggatttcaggttcccaaactccaagtgtttgccagaataccaaagtttagctcatgtacattgtaagtttttaaaaagaaaaaggtcagtgaggtatgctgtttaccctttgctttccaactgccaggatcttaaatatgcttataaataaatgtattttgacttgttcgtggttgagtatttttcctatcttttaaaaaaacaggctcccagtaccagccttgcaagagaacttttcttcactgttgggagtattgaaagagtctgtacagttgaatctagccccacctgggtattttctgcttctcaggtatcatgtcaccacattgtcattgtgtaatattttctcttggcacatattttatttctgcagcatttttaatctgaagctgattgtctcccaacagcatgctgaatgactttgtaacaagaactcccaacctggaaaacaagaaggaccaaaaagacctgcaggtttgtatatgaaagaggttcagccaaatgatattaccccagcagtgctgtcctcctttgggggatatcagatagcaggtagacaagagacattggacagaatctgaggttagctttgcacttgttctcaagtcttacttctgccatcactgtctctagagagttcggacagtcccggggcccgggttttctgatgaaggttcttgtgtaatgcttgagcaatcgattgtggaattgacagctgcacccctcaccctccacactgtatgcagatgtatgtggatctcactgtaaaacataaatggaataagaaatcttatttccccccagacgcggtggcgcatacttgtaatcccagtactttgggaggctgaggcgggcagattgcttaagctcaggagtttgagaccaatctgggtaacatagtgagacctcatctctacaaaagtacaaaaattagcctagtgtgatagctacacctatagtcccagctacttgggaggctaaggatcccttgagcctgggaggttgaggctgtagtgagctgtgatcacaccactgcacttcagcctggcaacagagagagatcctgtctcaaaaaaattttttaaaaaaggaagctatctccatacatggatatttctttttttcttttttttttttttgggccagggggttggacagaatctcactccatcacccaggctagagtgcagtggcacggtctcagctcactgaaacctccacctctggggttcaagcgattcttctgcctcagtctcccaagtagctgagattacagacatgccaccacgcccggctaattttttgtatttttagtagaggcgggctttctccatgttggctggtctggtctcagactcctgacctcaggtgatcctcctaccttggcctcccaaagtgctgggattacagacgtgagctaccacacccagcctccatacatggatttctttccttaaacgccttatcccccattataacagtaatatatgctcataacaatttgtttaatactgaaaaataaaactcatcataggagaaggaaaactcagagtggaatgccaactaataaatacggaagttatgatgaagttggaaaaatcactgttttgcaaaccattatagacattgattcagttggcttttctatcacatttatagccttggcgatactactgctaatctttatgatccctggcatttgtgaaaggtatatccagaaacagcctcaggtccacagttctgaaccacaagagtactgtataaagtgcagtaggccgtgtgcggtggctcacgcctgcaatcccagcactttgggaggccaaggtgggcggatcacctgaggtcaggggttcaagaccagcctggccaacatggtgaaaccccacctctactgaaaatacaaaaattagccatgcctggtggcggatgcctataatcccagctactcaggaggctgaggcaggagaatcgcttgaacctgggaggcagaggttacagtgagccgagatctcaccaccgtactccagcctgggcaacaagcgtgaaacttcgtctcaaaaacaaaaaacaaaaaaacaaaaacaccataaagcataattagaaaattccagtgcctcctcctttggccttgacttgtagccagagaagaaaacgttacaatgccgatgctgcacgtccaggtgctgggatagcacttgctcacctaagccctccctgctttcgtggcctgttgcctgtagcaggcccctctgtcttcagccagcctggacagggctctggccacaggcattccctccgttgttgcagctggcatgcctcttctctgctccttttggttgcggggaccaggtggcatctgcttctttctgtctcatgacacctggcctccccgccactaattccttcctactgttttgagcgacaccctatgcttcttccccactgaggatatagaaaaaaacaaagtgtgattttcctaccacactctcgtaacatagaatccttctgtgacctcgtaaccaaaatgtgtgggaattgcttcccaccagcaaccaagctagtagttctgcagtggacactagataggcaccgtccaattccattcaattctggcattccccacctagagatagcttgagatcctgcaggttgagggctcagtcccacaagactgccccaccccctcagatgccaatcacaagccccaagtggtttcatctgtgcttttgacagaccagctctaaactggggttctcactacccaccccttgggttctgttaattagctggagtggctgatggaactcagggaacacattgaacagtttattttatttatttatttatttttttgagacagagtcttgctcttgttgcccaagctggagtgcaatggcacgatctcagctcactgcaacctccgcctcccaggttcaagcgattctcttgcctcagcctcccgagtagctgggattacaggtgcccgccacaatgccagctaatttttgtatttttagtagaggtggggtttcaccatgttggccaggctggtctcgaactcgtgacctcgtgatccagccgcctcagcctcccaaagtgctggaattacaggcatgagccaccacacccggctgaccagtttattataaaggagattagaaaggatacagatgaagcgatgatcaggcaaggtacgtgggaaggggcacagagcttccatgccctcctagggcaccaccctctaggaacctccacatgtttagccatccagaagctcatccgaacccagttactttggggtttgtggaagcttcattacataggcatgatggattaaatcactggtcattggtgatcaatttaacctttagcccctctccccttcctggaggttggggagctgaagttctctgggggcccccagccacaaccatctaagacacgtattactttggagaatccaaggaatttaggagttatagctgggaaatggggagaaaggccaaaaacatttccacaatatcacacccgtccactcagtgctttcatcagtccttacgggaactcctctaagcccctaatcccttttcctgactttccttgtgcccttcacaccctgccctgcctaagttagccaattcgccacttccctcgagcgcacccttctctcacccagcaggcaggtgtgccctgcttcacacctcaacacaactgctgagcctaggaaccgtgtggcacagttgaggtcaggattataaaattctcggatgtcaaggattatagccactcgtagctggtgacacttgatgacactggctgagaagcctgcttcgagtttctgtctctccagctactaaccagattctttactgatcatactcctgagagtggatgactcctcacttcaccccactgagtcagtttaacttactgacctttatttcttgtatattattgaaagatgcatttctaggaagaacccgtggtcctagagaaaccagaaagccaatccactgaatacaatttatggttttttcatcagcgtgctgcaatgacttgtgttctctgtatattttacctacattggccagtatagtagccgttagccacaggtggctgttgagcacttgaagtgtggctagtctgcagcctgggcaacatagggagaccccatctctacaagaaatttaaaaattatccagatgtggtggcatgcacctgtagtcccagctacctgggagcctaaggatggcttgagcccaggaggtcgaggctgcagtgagacttttttttttttttttttgagatggagtcttgctctgttattgggggaactcacccccagtatttcaatgtaggttctttctattttccgtaagtgtcggccggctgagaaataaagggacacagtataaagagaggaatgttacagctgggccaccaggggtgacatcacgtatcagtaggaccgtgatgccctcctgagcctcaaaccagcaagtttttattaagggtttcaaaaggggagggggtgtaagaacagggagtaggtacagagatcacatgcttcaaagggcaaaaagcagaactaataataagggtctaacaaagatcacatacttttgagggaacaggacaaagggcaaaagcagaactactgataagggtctatgttcagcggtgcacgtattgtcttgataaacatcttatcttaacagaaaacagcgttggagagcagagaaccggtctgaccacagatttaccaggatggagtttttccccactctagtaagcctgagggtactgcaggagaccagggcgtatctcagtccttatctcaaccgcataagacagacattcccacagtggctgtttatagacctcaccccaggaatgcattcctttcccagggtattaatattaatattccttgctaggaaaagaatttagcgatatcttccctacttgcacgtctgtttataggctctctgcaagaagaaaaatatggctcttttttcccaaccccacaggcagtcagaccttatggttgtcttcccttgttccctaaaaatcactgttactctgttctttttcaaggtgcactggtttcatattgttcaaacacacgttttacaatcaatttgtacagttaacacaattatcacagtggtcctgccatgatgtacatcctcagcttatgaagataacaggattaagagattaaagacaggtgtaagaaattacaaaagtattatttgggaactgataaatgtccatattaaaatgaaatcttcacaatttatgttcctttgctgcggctccagtcggtccctttgttcggggtcgctgacttcccgcaacactctgtcaccaggctggagtgcagtggcactatcttggctcaccacaagctctgtcatctgggttcaaatgattctcctgcctcagcctcccaggtagctgggattacaggcgtgcaccaccacgcctagctaatttttgtatttttagcagagacggggtttcaccatgttggccatcatggtctcaatctcttgaccttgtgatccgcctgcctcggcctcccaaagtgctgggattacaggcgtgagccaccgcgcccggctgcagtgagtcttgattgcaccactacactccagcctggttgacagagcaagaccctgtcctgcccaccacctcctaaaaagaaaaatgtggtagtctgaattgaatgcactgtaagtgcaaaacacacattggatttcagacttagggcacacacaaaagagaatgcaaaatctgattaataggttgtttttgttttttctttttgagacgaagtttcgctcctgttgcccaggctggagtgcaatggcatgatctaggctcactgcaacctccacctcccgggttcaagtgtttctcttgcctcagcctccaaagtagctgggattacaggcatgcaccaccacacccacctaattttgtattcttactagagacagggtttcaccatgttggtcaggctggtctcaaacgcctgacctcaggtgatccgcccgcctcagcctcccaaaatgctgagattataggcatgagccaccacacctagcgtattaataatttttatattgagtgcatgttgataatattttgtatatattgggttaaataaaatacattattaattttttttttgaaacgaagtctcactctgtcatccagactggagtgcagtggcatgatctcagctcactgcagcttccacttcctgggatcaagcgattctcttgcctaagcctcccgagtactgggactacaggcatgtgccatcatgcccagctaatttttgtattttttttagtagagacagggtttcaccatgttggccaggatggtctcaaactcctgacctcaagtgatccccctgcctcagcctcagcctcccaaagtgctgggattacaggcatgagccactgcacccagcctatattattaatttaactttaactgtttatttttaccttcaatgtggctcctagaaagcttaatggtacgtatatgctcacagctgtggcctgcattttatttctactggacagtgctgttttaggcacttaacattcttttccttaattaacttcctttccccctcctcctgataattctcaggaaatcactcagaaaatcctagaagctgtggggaacattgccggctcttccttggagcaaaccagctggctaagcagaaacctggaagtgaaggcccaacctcaggcctctctagaagaatctgatgctgaggaggacctgtatggtaggtggagatgggttggctgatagtgcctctggtcagcgcgtggttctggcttttccttaagagagatcttgagtgttctcaccacaaaaagaaagaaagtacttaaggtaggctgggtgcggtggctcacgcctgtaatcccagcactttgggagaccgagatgggcagataaagcaaggtcaggagtttgagactagcctggccaacatggcgaaaccccgtctctactaaaagtaaaaaaatcagctgggcacagtggtaagcacctgtggtcccagctacttgggaggctgaggcaggagaatcgcttcaacctgggaggcggaggttgcagtgagccgagatcacgccactgcgctccagcccaggcgacaaagcaagactccgtctcaaaaaaaaaaaaaaaaaaaaaaaaaagtatttagagcagtgacaagatgttagtcaaactttagaaaacatcactttgaggccaggcatggtggctcacgcctgtaatcccagcagtttgggaggccgaggtgggtggatcacctgaggtcaggagttcaagaccagcctggccaagatggtgaaaccccatcttaactaaaaatacaaaaattagccgcgcgtggtagtgggcgcctgtaatcccagctacatgggaggctgaggcagagaattgcttgaacctgggaggaggaggttgcagtgagccaagattgtaccactgcactccagcctgggcgacagagtgagactacacctcaaaaaaaaaaaaaagaaagaaagaaagtacctgaggtgatgcatgtcttaacttgtgttttttcacaatgtatgcatatatcagcagggatggtgaaatattgaaaaaagaaaacatatatcaaaacatcatgttataacctgaaatgtataccagttttatttgtcagttatatctaattaaaactggtaagggaaaagatgttggaaagttaaaaaaaaaaaaaaagtttaggcataggaaaaagcaaactaccttctcaagtctgtgttcattcacccagactctttctttgttttttgtttttgtttttttgagacagagtctcgctctgtcacccaggttggagttcacccaggttggagttcacccaggttggagttcacccaggttggagttcacccaggttggagtgcagtggcgtcatcttggctcactgcaacctccgcctccctggttcaagccattctcctgcctcagcctcccgaatagctgggattacagacatctaccaccatgcctagctaatttttgtggttagtaaagacagcgtttcaccatgttggccaggctggtctcaaactcttgacctcaggtgatccacccacctcggcctcccaaagtgctggtattacaggcgtgagcctctgcgcccggcccagactcttcctttgtatccatagccagatgactgaactgtctgttttgactttttacaacatactatgtgtgtgtgctaaacaccgggaccccttagctggtgtcccaccatgtgtatgccatcctgctgaccttcactgagcctcagtggggctccagaaagtaacaccccaagaccatttacctggacatggtgatagaaatctgtgtgggataaagatgatgagaatgtgtgtgtttctttttgcagaactatggaaagagaatttagcaaatcaagctgggagggttggctcacgcctgtaatcccagcactttgggaggctgaggtgggcgggtcgcctgaggtgattacaaatgatcctttttttttttttttcaggattaagcatatcttggggcaagtgattttctttgctactgtcagtgtcatttaacacagggaaggacagtatgcccagtgccagtagagcttaatacaacgtgagaaaggatgtttggtcccagttttatttaatacaggaacaagaaactacatttcagttttcagtgtaaactatcacagtacctgccacagagtaatgttcaaatattgttatctttcattattacttctacgaaaattgttagcagggctgggtgtagtggctcccacctgtaatcccagcactttgggaggccaaggtgagaggatggcttgaggctacaagtttaagactatcctggttagcgggcatggtggctcagacctgtaatcccaacactttgggatatactccatttaaaaataaatcaggccgggcacagtggctcaggcctgtaatcccaggactttgggaggccaaggtgagtggatcacccgaggtcaggagttcgagactggcctggccaacttggcgaaactccatctctactaaaaatacaaaaattagccaggtatggtggcgggcatctgtagtcccagctactcaggaggctgaggcagaatgacttgaacccggaaggtggaggttgcagtgagccaagatcgtgccactacactccagcctgggtgacagagcgaccaaactccatctcaaaaaaaaaaaaaaaaaaggactatcctagtaacacagcaagaccccatctcaggccgggcgcggtggctcacgcctgtaatcccagcactttgggaggccgaggtgggcggatcacctgaggtccagagttcgagaccagcctgaccgacatggagaaaccccatctctactaaaaatacaaaattagctgggtgtggtggcgcatgcctggaatcccatctactccggaggctgaggcaggagaatggcttgaacctgggaggcggaggttactgtgagccaagatcgcaccattgcactccagcctgggcaacaagagcaaaactccatctcaaaaaaaaaaaaaaaaaaaaaaagaccccatctctacaaaaggggaggcagaggttgcagtgagtcgagatggcgtcactgcactccagcctgggcgacagagcaagactcatctcaaaaaaataaataaataaaaataaggccaggtgcagaggctcacacctgtaatcctagcactttgggaggctgaggtgggcagatcacctgaggtcaggagttcaagaccagcctggccagcatgatgaaaccctgtctctactaaaaatacaaaaattagccaggtatggtagtgtgtgcctgtaatcccagctacccgggaggctgaggcaggagaatcactggaacctgggaggcagaggctgcagtgcgccgagatcgtgccactgcactccagtctgggcaacagagggtgcaaactccatctcaaaaaaaaaaaagtttttttaatgactaaaagaaagtaaattaccaagagaatttcaggtgggacttagtactgcgaggaaagtaagagtaatgtgataaggagtggctggtagtggggcagggccactgtgagtgttacagaacatgtccccaaggaggtgacagttgtgctgagagatgaaagacaaggggacagccctgcagaggtctgggaaggcactgccccgaggggattgcaggccttggccacgggagtgggcttagacccagcgacctgaagaccaggactctggagcttcatgaaagtggtgggaagaggtcagagaaagggtggagactgatgagactgatggttgtcgggcttggtagaaagcacactaaggggccgggcacagtggctcacacctgtaatcccagcactttgggaggccgaggcgggcggatcacgaggtcaggagatcgagaccatcctggctaacatggtgaaaccccgtctctactaaaaatacaaaaagaaattagccgggtgtggtggcaggtacctgtagtcccagctactggggaggctgaggcaggagaatggcgtgaaccagggaggtggaggttgcagtgagccgagatcgcgccgctccactccagcctaggcaacagagactctgtctcaaaaaaagaaagaaagcacactaaggagcttggatttcatcccacttgccacaggtagccttaaagtacttagagcagccacatgttagtcaaactttaaaaaccatcactttggctgctgtgatcagtacagtgtgtattggatgagcacagaaactggaagtccaggtaaaaggattttgcgctggttaaggcagaagatgattctggcttggaggcagggtcaacagaaagggacagtttaaatgcagagtcagcaggatttgctgatggatcggatgtagttattttagaaaatgcagccaaggatgacaggtttttggcttaagcaatttaccaaggtggaaaaaacagaagaaaaaacatttcgtagagaaaaattgagcttgattttgcacatgttaagtcggaaatgatggaaaagagaaggacccagcaaagatgattaagcagtcactgaggtgggtgaaccaagagagcatagagccttggagtctgggaggagacaatgtgtccgaaggccccaggggcagacacacggtggagggccgctgagaagcaaagtgcaacaggaaggggcaacaggagctgacaatgtagaattcatcggggtgggtggtcaggatggtgaggggacacttgagaaacaggtggagaagaggatgggaatggagcaaggggagacagtggaggtcggtaactctttgaggctagttgtccatagggcagtagccaagcagaattaaggaccagagaatgttttgttgttgttgttttgtgtgtttgtttgagatggagtctcgctctgttgcccaggcaggagtgcagtggcgtgatcttggctcactgcaacctctgcctcctgggttcaagcaattcttctgcctcagcctcccaagtagctgggattacaggtgcacgccaccacacctgggtaatttttgtatttttgacagagacagggtttcaccatgttggccaggctggtctcgaactcctgacctcaagcgatctgcccgccttggcctcccaaagtgctgggattacaggcctgaaccactgcacccggcctgatttgtttttaaatggaggatatcaaagcctatttgcatggtgacagaacagtacagcagagaggaagaaattaattcaagagagaggaaggataattagcagagtccttgatggccacagggccaggattgggatcataaatggaattattgttatttgataggagtcaggaacatatctattaaaacaggagatgaggctgggcacagtggctcacgcctgtaatcccagcactttgggaggctgaggctagcagtttgcttgagcccaggagttcgagaccagcctggacaacacagtgaaaaatccccatctctacaaaaattacagcctgtagtaatgggacctgtagttccagcttctgaggaggctgaggtgggaagatcacttgagtccaggaggcggaggctgcagtgagccaagattgcaccactgtactccagcctgggcaacaaagcgagaacttgtctcaaaaaaaaaaaaaaaagaattatgttggagagtgggaaagccagcaccccacctgggaacatgtggtagcatcaagtcccttgagagattcatggtcatgacataaagtaagatcagttgcttggtggtctggtttgctctggaacatttagctacacataactacgtagacagatcattgggtgtacccagcagtgcattcttctaggtgagtccttccgagggaaagaagcaaaggagtgaagggtagatgactgaccctgggtgtgggtgggaggtgaggacctgtagcagctgctgggtagttaggcagtaggactcagggactggaaagctgtcctaggatgcaggaaaatgccagaggggtggtcagaggaggatgctggaaacggagatttgagaagctggtgaggtcaagggtatgacagtggtggagctggagcggagtcggggatggttagaagagaagaaggccaggggcttagaggctgggatgtaggagggagcatccaaaggggtcgtgcagtttcaagaacgatgatgagaatggaaatggagaggatgttagtgagttagtgctaatttatttgatcaaaatatccagattcttagttgttgaaactgaatgttggcagggtgcagtggctcacacctatagtcctagcacttagggaggccaaggcaggcaaattacttgagcccaggaattcaagaccaccctgggcaacatagcaagactttgtctctataaataattttaaaattacctgggcgtggtgatgtgtgcctgtgcccccagctactcgggaggctaaggcaggaggatcatttgagcctgggaggtcaaggatagagtgagccatgatcatgccactgcactccagcttgggtgacagagcaagatcctgtctcaaaaataaaaataaaaaagttgaatgatggccaggcacggtggctcacgcctgtaatctcagcactttgggagaccaaggcaggaggatcgcttgaggccaggagttcgagaccagcctggccaacatggcaaaaccccgtctctactaaaaatacaaaaattagccaggcatggtggcacatgcctgtagtcccagttactcgggaagatgaggcaagagaattgcttaaacctgggaggtggaggctacagtgagccgagatcacaccactgcactccagcctgggtgacagggtgagactccatctcaaaaaaaaaaaaaaaaaaagaaaaagctgaaagttaacagagaggaatacctgagtcatatggacacaattggtatgaaaggcgggagctgatggctcacattcatgcagggcttttggggacagtaaatggtgacccatccatcatagttaacatacaaatggctctttctgttcacagatgctgctgcagcttcagcaatggtgtcttcatccgccccgtcggtgtacagcgtgcaagccctctctctcctggcagaggtaaatacacacctgacctgtcgtcctttatggaaatgagcgccatcacgaattgttgcaaagacatttgttcattcccaggtgccagtgagcgtgggccgcaccctcccaggtgagctcgtccatcaggcagcattggcctcaagctgcaccatggagttttgggttaggttttgctttaaggactgcacttttttttttgagacagattcttgctctgttgccaggctggagtgcagtggcgcgatctcagctcactgcaacctccacctcccgggttcaagcgattccgctgcctcagcctcctgagtagctgggactacaggtgcgcgccatcacgcccagctagtttttagtattttagtagagacggggtttcactgtgttggccaggatggtctcaatctcctgacctcgtgatccacccaccttggcctcccaaagagctgggattacaggcgtgacccaccgctcccagccataactgcttttcttattgttgctcgcttccaagggtttctgttttctttcttttttttttctttttctttctgttttctttttttgagatggagtctcgctctggagtctgcactcaggctggagtgcagtggcgtgatctcggctcactgcaacctctgcctcctgggttcaagcagttctcctgcctcagcctcctgagtagctgggattacaggacctggctaatttttgtatttttagtagagatggggtttcaccatgttggccagactggtctcaaactcccagcctcaagtgatccgccctcctcagcctcccgaagtgctgggattacaggtgtgagccgtcgcacctggccagtttctgttttcttagggccttgttcttttaggtactggcttccctcctggacatggtttatcgaagtgatgagaaggagaaagctgtgccgttaatctcccgtctgctttactatgtttttccatacttacgcaaccacaggtaacgtcatcttcgccatttcttcccacccatatgcagaaaaatatgttttcacaaatgaatcaagtagttttccttggacagtccttgaccttgacccttctctcttcccactcccactcagtgcctacaatgctcccagcttccgggctggcgctcagctgctgagctccctgagtggctatgcctacacaaagcgagcctggaggaaggaggtcctggagctgtttctcgaccccgctttctttcagatggatacttcctgtgttcagtaagatatgctgtcctgataacaacgtgctctgaatcttcaggtggaaatggcattttggtttacagaattctcattcctgaaatagaagcagagccataggatcaacccaaataacaggacgtccctgtcacaggctcgcatgttgaccatgtgttcatgggaaagggatcaagtcttttaaagtacaaagaggaatatcacttaattcagagagcatgttatttcctggctgggcacggtggctcatgcctgtaatcccagcattttgggaggctaaggtgggtggatcacctgagcccaggagttcgagaccagcctggccaacatggcgaaaccccgtctctacaaaaaaattcaaaaattagccgggcatggcagcgcacacctgtagttccagctactcgggaggctgaggtatgagaatcgcttgaacctgggaagtgaagcttgcagtgagtcaagatcccaccactgcactccagcctgggcaacaagagtgaaactctgtctcaaataaataaacagcagaacttggggttccagtgatacttgttctatctaatactgctttgtcttgtaatcacaaaataattggccagtgttaagatgacagagcccactgggtgaccctgggggtgtctttaccccacttctcggctgatactccacaagttcttactgagatcttgcagcagccaagcagagatccactgagactcagatgcaagatgtgctcctgggccttttcctgagataaagaaaatcactcagggctggtcatggtggctcacacctgtaatccaacattttgggaggcttaggcaggaggattgcttgagcccaggagttggagaccagcctgggcaacaaagtgaaaccccatctctacaaaaaaaaaaaatcaaaaaaattagccaggcatgcgggcatatgcctgtggtcccagctacatggaagcctgaggcaggaggatcgcttgagcccaggaggttgaggctgcagtgagctgtgattgtgccactgcactccagcctgggtgacagcacacgaccctgggccctgtctcaaaataaccagaaagaaagaaagaaagccactcctttattaatgacaggaaggcttagcgatagagggtagagattgggaaccctttttgtatggcatgaaagcatggccacccccagagggctgctggtggccctgtggcctccctccacgtgatcttgttgctctgctggggtagctcatttggaaagaaaagctaagggtggtatttgtcttcactatcccactcttttcatcaacacaactgtgtgaatatcatcctgtatgaacatatttaagaataacccttgaaaaagccagagtgccttgtcagtttgtttctttgtggtaaactggaaaaagtcatcattcattccctatgttagggttataaatgaaaagctttttcgtagctttcttttatatgtaaactatttatttctatcactaacctcttttcagaaagcagtttttttgtttgtttgtttttgagatggagttttgctcttgttgcccaggctagagtgctatggcacaatctcagctcaccacaacctccacctcccgggttcaagcgattctcctgcctcagcctcctgagtagctgggattacaggcatgcgccaccacgccctgctaattttgtatttttagtagagacagggtttctccatgttgctcaggctggtcttgaactcccaacctcaggtgatccgcccacctcggcctcccaaagtgctgggattataggcgtgagccactgcacctggcccagaaagcagtttttaatatatcttaagaggatatgttattttcttaatgttttgaatcaaactatcatccactgcaaatttaattgattttgctttctttaatatccagttggaagtccattattgaccatcttttgactcatgagaaaacaatgtttaaggatttaatgagtaagttctgtgttacttttgcataactcacacttgataggatcaatgccaatataaccagctttcatcatgtatttccgaaccctactcacactttcatggtgctgtctacgccacaaagactgtaatgtgatgttcataatatggcaggactaaatcaatgagtcttttccagttgcaatttattgacaagaacgccacgacaacctttttcatagttttatagtggagaaatactgccgaaagcatccagcttcacatcttgacatttgtgctgaaagtaataagtttctataatttactaggaggacttttctacacctcagatcccttctcatgcactatcattaagtatcattaaagaaataagtattgggctgggcacggtggctcacgcctgtaatcccagcactttgggaggctgagatgggcggatcacagggtcaggagatcgagaccatcctggctaacacggtgaaaccccgtctctactaaaaatacaaaaaatagccaggcatagtggcgggcgcctgtagtcccagctactcgggaggctgaggcaggagaatggcatgaacccgggaggcagagattacagtgagccaagatcgtgccactgcactccagcctgggcgacagagcgaaaatccttctcaaaaaaataaaaaaataagtattggctgggcacagtggctcacgccaatcccagcactttgagtggctgaggtgggtggatcatttgagcccaggggttcaagaccagcctgggcaacatagcgaaaccccatctctacaaaaaattaaccaggcactgtggcacgcacctgtagtcccagctacttgggagactgaggcaggaggatcgcttgaacccaggaggtcgaggccgcagtgagctgtgatcccaccactgcactccaggctgggtgatagaatgagatcctgtctcaaataagaaataaaaagagaaataactattttttaaatatacatgggaacagtaatctcatgtccttacttaataaagatcatgatttttcaccagggaatatagaattacactagtatgaatttcccatcacttccctccaattgtggttttctcactaagtaaaacattgctgtatttattctagacatgcagagcagttctttgaaactattctcaagttttgaacagaaagccatgctgttaaagcgccaggcttttgctgtcttcagtggagaacttgatcaataccacctttaccttccactgatacaaggtaagacagctgtcttagtctgttttttgctgctataacagaatacctgagactggggaatttataaaaacagaaatttattgcctcacagttctggaggctgagaagtcctatatccagggctggcgtctggcaagggccttcttgctgcaacatcctatggcagaaggtggaaaggcaaaagagcaagagggggctgaacctgcccttttattacagtaccaatcccatccatgatgtggcctaatcacctcttaaaggccccacttcccgataacattacatttacaataaaatttgagcatgcattttggacaggacaaacattcaaaccacagcaacagctgacctgccctcactgcccccacacacagatagacccatgaggggctgagatgattaagtactagaggggtctactgcgtgctttggcatgattgtcacttgttaaaacaagtattctgcagagttatagaacttcagaagtatattggtaaatctgaaactttattttaaaatcaattataggtcaggtacagtggctcatgcctgtaatcccagcactttgggaggcccaggtgggtggatgacttgagatcaggagttcaagaccagcctgaccaacgtggtgaaaccccatctctactaaaaatacaaaattagccaggcgtgatggtgcgcacctgtaatcccagctacttgaggctgaggcaggagtatcacttaaacccaggaggccaaggttgcagtaagccaagatcacaccactgcactccagcctgggcaacaagagcgaaactctgtctctaaataaatacataataaaatcaattacagtgttattaatttgtattagtttttaaaagtctgaccacagtataggaataatacttcctcagcactgtctcttgctagagtcctcctgcagtcaaggtactcggtgtttacagtactcccttaatcagcaccttcagctgaggccagggaaggggcaagattttggagaaggatctaatttttccttaacaatttttttttcatccccactacattctttgactgcatcaaaaataattattgctgactgggcacggtggctcacgcctgtaatcccagcactttcagaggccaaggcgggtggatctcttgaggtcaggagtttgacatcagcctgcccaatgtggtaaaaccccatctctactaaaaatacaaaaataagcctggtgtggtgactcatgcctataatcccagctactggggaggcagaagcaggagaatcgcttgaacctggtaggcactgagccgagattgtgccactgcactccagcctgggtgacagagagagactccattgcaaaaataaataaataaattgttattattattgccaacatcgtacgtgattgtcagggtttttttttttttttccttctcataaaatgttcaggtggcaaagttgacattctgttttgtttttgttttcattttgagccagggtctccctctgtcacccaggctggagtgcagtggcgcagtctcgcctcattgaaacctccgcctcctaggttcaagtgattctcctgcctcagcctccaagtagctgggattacaggcacccaccaccatgtccggctaatttttgaatttttttagtagagacagggtttcaccatgttggccaggctggtcgcgaactcctgacctcaggtgatctgcccaccttggcctcccaaagtgcttggattacaggcatgagccaccgcacccagccggaaagatcttgttttagttcaaagcattaacagcgttgactcgttagtcatgataacttacatatgcaataataaaacacctttacactttaactgacataatttccgcatgtagtgcacataagatttttaccttgtaatatcttgaacacttaagaaacatgaaagaaaactttcaaatattaacaagtccagttggcgtgccttgcttgaataactgtgataggaggatgatttaatcagacggtaaccaggagcaccagtaaaggtaatgtcagctctccaaagactgtggctaaatgcaaggtcagagctgaactttgttgcctccctacaaaatctggagagaaaaagaacaacaggaatcaccttttctttagttcatgtgcagtataggggaggattctttatgaacccaaccactagacagtggccctaagggaagcagtaagcctactttctcagtggaggaaaatgaaaaggagagcatattgggcaatgtacctgataaccctttcagtgccttttcagtctaagagcagacacctgttccttttttttttttttttttttttttcctttgagatggagtcttgctctgtcacccaggctggagtacagtggcacaatctcggctcactgcaacctccacctcccaggttcaagcaattctcctgcctcagcctccaaagtagctgagattacaggcaccagccaccacactcagctaatttttttgtacttttagtagagatggggtttcgccatgttgaccaggctgatttcaaactcctgacctcaagtgatccgcctgtgttggcctcccaaagtgctgggattacaggcatgagccaccgtggccaaccacctgttccttctttctttttttttttttttttttttttgagacggagtctcgctctgtcgcccaggctggagtgcagtggtgcaatctctgctcactgcaatctctgcctcccgggttcaagcaattctcctgcctcagcctcctgagtagctgagattacaggcacacaacaccacgcccagctaatttttgtatttttagtagagacagggtttcaccatgttggtcatgctggtctcaaactcctgaccccgtgatccacctgcctcggcctcccaaagtgctgggattacaggcatgagccactgcgcccagccctgttccttctttctaccccatctcacactcctctcaaatttgggaggaagcccagatagctaaatagacagcattaggtgtatagaagctagaaccaaaaaaacaaaaagatagacaacattctgaaacaggggtgtggagaatttgaccatggtagagtttaaacacccagcaattctgagaaattatttctctgagagggagcaagcacaggcaatataatagaatatatatataaaaaacatgttttacataatatattaatatgttatataattatatgacattgtaacatgtaattattatatttgtattatattgacatgattgtaataactaataggtaatgattatataaatagtaatattaaatattatactatataacaatatacttgtttatattatatattcaaatatgcaataaaggcagcagaatgctaactgaaaatggaggtaggttttgggctcttgggaaaagagaaatttttttgttgttgttgggaggggaacggagtctcactctgttgcccaggctggagtgcagtggcacaatcttggctcactgcaacctccgcctcctaggttcaagtgattctcctgcctcagcctctcaagtagctgggattacaggcacccaccaccatgcctggcttatttttgtatttttagtagagatagggtttcaccatgttggccaggctggtctcgaactcctgacctcaagtgatccacccgcctcagcctcccaaagtgctgggattacaggcatgagccaccatgtctggccgggaaaaagaatttctaaataaatacgcttcgttttggatagctcaagtgctatatttctaaaaatactacgtgtttttaaaaaataagccttttgccctgttttcatttttgatgaactgacagtttacagagcactttcctacatgttgtcgttgtccccaggatgctcgtggataggcccagcccccctgagtcctgggttgatggcactcagagtgtcctctgccagagctgtgggacactgaacttgcctggagatgccctgtggagggatgatgcccacatctgcctcagagaggtagatgcatccagaagctcccaagaagtgtcccatagtaaatagtttgggcccaattaaaagaggcaggaggctgggcacagtggcctgtaatcccagcaccttgggaggctgtggtgggcaggtcacttgaggtcaggagttcaagaccaacctggccaacatggtgaaaccccacctctactaaaaatacaaaaagttagctgagcatggtttcaggcgcctataatcccagctacttgggaggctgaggcaggagaattgcttgaaccctggaggcggaggttgcaatgagccgagatcgcgccactgcactccagcctgggtgacagagtgagtgagactccatctcaaaaaaaaaaaagagacaggagtggagaatttctaacacttctctcctgggataccgtttggggtccttttccccggacactgttgcaccatcgagtagcagagaaggagatggggagctgagcagctctgtatgtctcggctcagagtgacatcagtcttacgtctttgggggctgggaagatgtaggtgaaaggatacgaaggtgcaattatggaggatgagtaagtctagaaaaggcatgtacaacatgaggactgtcgttaataacactgcatatgtactgggaatttgccaagagagtagattttaggtgctcttaccacaaaaaagaaaggtcaaagacaggcgcggtggctcatgcctgtaatcccagcactttgagaagccaaggagggcagatcacgtgaggtcaggagttcaagaccagcatggccaacatggtgaaaccccatatctactaaaaataccaaaaattagctgggtgtggtggtgggtgcctataatcccagctactcgggaagctgaggcatgagaatcatttgaacccaggaggcagaggctgcagtgagccgagatcgcaccactgtactccagcctgagtgacagagtaagactccatctcaaaaacacacacacacacacacacacacacacacacacaaaactgactgagcatggcagctcacgcctgtaatcccagcactttgggagtccaaggcaggtggatcatctgaggtcaggagttaaaagatcagcctggccaacatggctaaaccctatctctactaaaaatacaaaaaattagccgggcatggtggcagacacctgtaatcccaactactctggaggctgaggcaggagaattgcttgaacccgggaggcggaggttgtagtgagcggagactgctctgctgccctctagcctgggcaacagagtgagactccatctcaaaaaaaaaaaaaatttattactaatatactaatgtactaatgtactacagccgatcttagctagcatgactaccattcagctgtttgctgtagcaatttgttacattcctaggaaaccttaagctatggaagaaaaaaaaagtctcattctacaaacaagacatttcaggggagaagcaggggagagtgttaggggctagagagtgttatttgaaacacttttccctccataggaatgaaagtttttgtcatggccatcaagtttaaaccttactcagtaaatctgttatatttacttgctccgcttcccacccaccaccctcaaaatatggtgttgtctgccagccagtccatatgattgtgtaagtccattcctcaccatgggctgcttggtttctgcgtctcctcattcatattcttaaaagaacattgaaatggctgttggtcatccagtggatttctggtgacagatgttcatgtctttctactcagctgtggcagggggacggcctgtgggaatcatttccttaggtttggcaagagccatgaactgctgtatttcacaaagaagagggctggggtggactagttgcacaaaagcatctcctaacattctttttttttttttttttttttttttgagatggagtctcactctgtcacccaggctggagtgcagtggtgtgatctcggcccactgcaacctctacctcccaggttcaagcgattctcctgcctcagcctcccaagtagctgggactacaggcgcccaccaccacgcccgactaatttttgtatttttagtagagatggggttttaccatattggccaggctggcctcgaactccttatcttgttatccgcccgcctcggcctcccaaagtgctgggattacaagtgcgagccaccaagcctggcctgtaacactcattccttacactgggttgttactagaatgtcagaacagtcacagttttatttttctttgtctgataagaaaccctaaactgcatatttgtgtaacatctttacaatcttctttccttagaacgcctgacagacaatctcagagttggacagacatccatagttgctgctcagatgtttctttttttcagagttttgctgctaagaatatctcctcaacatttgacttcattgtggccaataatggtctctgaattggtgagtacaagtattgtaagtttgaaagcaaggttggagctttttaaaatgctttttcagtaacataacgtactatttcctatgtatcccattttatctaaatgttatttttaatcaggttggtagcacatggttagctcttggttaaacagagaatattttactctatgatcatatttgatctctcaccctgtcagttattccaactaacttgtaccatttgataatacttactagttttttatatacatataaatttgggctgggcgtggtagcttatgcctgtaatcccagcacttcgggaggctaaggtggatggatcacttgagcccaggagttcgagactagcctgggcaacatggtgaaactccttgtctacaaaaaaatacaaaaattaattcggcatggcgggaagttgcatctgcagaaggttgaggctgcagtgagccatgattgtaccactgcactccagactgggtgacagagtaagaccccgtcttattcattcattcataaattaatcgatttttaaaaataagtaaaaaaaaatatttgggtagatttaatctgtctcagatagtaacttgaatgcatttttttttcagattcagacattcacacagcttgaagaagatctaaaagatgaagatgagtcattgaggtaagcagtacaagatctgtacacaagaggaaaagatagtcacgattaaagcacgtcactttagatatagagttgtctaatgttaaatgctgttatcttgaagtacttgtgaaaggaccagctattccaaaaatttcttaaaaagaaaattcttctgagggacaggtcataggtgaatggactataacagatctgaatgaatttataacaagcgtttctttgcaaatttatagaagcaccaacaaagtaaacagaacgaaagtttcagtcccggatgcaaatggaccctcagtgggggagataccccagagtgaactcatcttgtatttatcagcttgcaaattcttggacacagcgctttcttttccacctgacaagatgccattatttcaaatgtaagtcagataggatcgtgtgtcctttttgaagtaagagattttgttttttccttttaagcactttcacttgtttttcatgtacagtttatgggaaaccaccatctgggtttctagtgacagctaagccagctcggaataccaagtttcagattacttgcaacatctgtggctctgcaaatttggctcacaggagtgtttatgaatgtgtttctatggtgtgtgtgtgtgtgtgtgtgtgtgtgtgtgtgtgtgtgtgtgtgtgtgtggtttttgctactgaatgcttataaaacagggcttacccactggtgctcctcactgcctttgtgtagacctttttgtctgtgtttagttagatacaaatgcctttatttggagcctgccatctccgattcactttgccccataggcttatgtttcctgccggcttagcacagctgctcatttgtttaatttcatgaccagccccagaggctatttctctctctcctacccccacaaagagagtaatcatatagaaatgtttgtggttaaagagcgggttctcttaaatgcacattgctaagtgaaagaagccagtctgaaaaggctacacactgtatgattccaaccatgtgacattctggaaaaggcaaaaccatggagacagtaaaaagatcagtggtcgccaggggttggggagagggaggcagggatgaatgggtgaagcacagaggatttttagggcagtgaaattattgcatacagagctataatggtagatccatgtcattgtccatttctccaaatccatacaatgtacaccaccaagagtgaaccctgatgtaaactctggacttgggaggataacagtgagtcagtagaggctcttcagttttaacaaatgtaccactctggtgcaggatgttgataatacggcaggcttgtatgtgtgtaggatgggatgtacgggaactactttctactccattttgctgtgaacctaaagctgttctgcaaaagaaagtcttttagtttttaaaaagcaggtttgggccggacgtggtgtctcatacgtgtaatactagcactttaggaggctgaggcgggtggatcacctgaggttgggagttcgagaccagcctggccaacatggcgaaaccctgtctcaactaaaaacacaaaaattaggccaggtaccgtggctcacacctgtaatcccagcactttgggaggccaaggtgggtggatcacttgaggccaggagttcaagaccagcccggccaacatggtgaaaaaccctgtctctactaaaaatacaaaaattaggccaggcgcgatggctcacacctgtaatcccagcactttgggaggccaaggtggttggatcacctgagtttgggatcagcctgaccaacatggagaaaatccatctctactaaaaatacaaaattagctgggcatggtggcgtatgcctgtaatcccagctacttgggaggctgaggcaggagaatcgcttgaacctgggaggcagaggttgcagtgagccaagatcatgccatctgccattgcactccagcctgggcaacaaaagcgagactccatctcaaaaaaaaaaaaaaatacaaaaattagccagatgtggtggtgggcgcctgtaatcccagctacttcggaagctgaggaaggagaatcacttgaacccgagaggcagaggttgcagtgagccgacatcgcaccactgcactccagcctaggcaacagagcgagactccccctcaaaaaaaaaagaggccgggcacagtggctcatgtctgtaaccccagcactttgggaggccgaggcaggcggatcatgaggtcaggagttcaagaccagccaggccaacatggtgaaaccctgtctctactaaaaatgcaaaaattagctgcctgtattggtgggcacctgtaatcccagctactcaagaggctgaggcaggagaatcgcttgaaaccgaaggcggaggttgcagtgaaccgagatcgcaccactgcactccagcctgggcgaaagagcgaaactgcatctcaaaccaaaaaaaagtggaggctaggcgcagtggctcatgcctgtaatcccagcactttaggaggctgaggcaggtggatcacgaggtcaggagttcaagaccagcctggccaagatggtgaaaccccgtctctactaaaaatacaaaaaaattagtcaggcatggtggcaggtgcctgtaatcccagctactcgggaggctgaggcagagaattgcttgaacctgggaggtggaggttgcagggagccaagattgcaccactgccctccagactgggcgacagaacgagactgtctcaaaaaaacaaaaaagtgggttccgatatatgtgaatgtgcatagcaacattatttataataggcaagaagtagagacaacccaaatggccatcagctgatgaacaggcagatcatgtgacatatccatacagtggaatacggttcagcaacaaaaagaattgaagaactgagacacgctggaatctggatgaaccggaaaatatgatgctaagtgaaagctcgaaacaagggaacatatagtgtatgattctgcttatatggaatgtccacgatgagacagagtgtggattagtgggtgcctaggtctcaagggtatagggggttggggtggtgatggctgagcagggcaggatttctttttggggtaatgaaatactctaaaattgattgtgataatagacgtgcaactctatgaatataataaaaggcattgagttgtccatattaaatagatacagtatgtgaattatatcttaataaaactaattttaacgacgttgaaggcctcttaccagcagacctgaccttctgtttgttccctgcagttataggtgggcatttattccagaagtggacacagagggccctgccttcctgtcggatgtagaggagaatcaccaagaatgcaaaccccacactgtcaggattctagaacttctaaaattaaagtttggggtaagtgcttttcttttcttttctttttttttttttttggtgagacagagtttcactcggccacccaggttagagtgcagtggtgcggtcttcgcttactgcagcctccacctcccaggttcaagtgattctcctgcctcagcttccggagtagctgggattacaggaatgtgccaccacacctggctaattttgttttgttttgttctgagacggaatctcactctgttgcccaggctagagtgcagtggcacaacctcaggtcactgcaacctcagcctcctggtttcaagcaattctcctctcagcctctggaatagctggaactacaggcgcacgccaccatgcctggctaatttttgtttttttgtttttgggttttttttttttttttttgagacgaagtctcactctgttgcccagactggagtgcaatggcaggatctcagctcactgcaacctccacctcccaggttcaagcaattcccgcacctcagcttcccaagtagttggaactacaggcacatgccaccactcttggggctaatttttgtatttttagtagagacaggttttcgccatattggtcaggctggtctcgaactcctgacctcaggtgatccgcctgcttcagcctcccaaagtgttgggattacaggcgagagccaccgtgtccagcctgcttttctttttaaaaattatattcatgaggctggtaatcccagcattttgggaggccgaggtgggcagatcgcctgaggtcaggagttcaagaccaacctggcaaatatggtgaaactccatctctacaaaaatacaaaaattagctggtcatggtgaccggtacctgtaatcccagctactcaggaagctgaggcaagagaatcgcttgaacccgggagacagaggttgcagtgagccaagatcacgctgctgcactccagcctgggcgacagagcaagactctgtctcaaaaaaaaaaaaaaggaccttatttcttaggttttgccacatgcatgtgcttcccagccatctcgagccctcagtaaaaccatatcattgttatgggtttgttttttctgcaggaaatcagtagctctgatgagatcaccatgaagagtgaattcccgcttctgcgccaacattctgtttccagcatcaggcagttgatgccattcttcatgactctaaatggtgcatttaagacccagagacagctgcctgctgatagcccaggaactccattcttggactttcctgtcacagatagcccaaggatcttaaaacaactggaagaatgcatcgaatatgattttctggaacatccagaatgttaaccatgtgagagagaatatgtttaatccatgtattggtactttactgaaaaccaggttatattctaaagaagaaagaaggcaggatagtgcttttgaacaagcctatttccattttgaaagtagatttcaggctaggtgcggtggctcacacctgtaatctcagcactttgggaggccaaggcaggcagatcacttgaggtcaggagttcgagaccagcctgaccaacatggtgagaccctgtctctactaaaaatacaaaaattagctgggtgtggtggcggcgcctgtaatcccagctacttgggaggctaaggcatgagaattgcttgaacccaggaggtggaggctgcagtgagccgagatcacgacactgcactccagctgtgtgacagaatgagaccatctccaaaaaaaaaaaaaagtagatttcagataatttactgttcagcaacaggacacacctccctaaatgccttgtaatatatttgaatctgattctgcatttcttcctcaatttatgtaatgaaaataaaattaatatatcatctaacagtagcacaaaatttgtaatatgaagtaaagtatgaagataatgaagaagttgttttctttgttgaagcagttatatgggtctttctcagtatatttctcttttct

SEQ ID NO: 349 - DNA, 7246 bp, Homo sapiens
ttcatctcccacagtgcctggcccagaagccttgctaaatatttgaacaggattgcccaatacttttctgctgtgagaatgtaagatggatccagaagagcaggagctcttaaatgattacagatacagaagctactcttcagtgattgaaaaggctttgagaaattttgagtcctcgagtgaatgggcggatctcatatcttcacttggcaaactcaacaaggctcttcagagtaacctgaggtactccttgttgccaagacggctcctcatcagcaaaagattagctcagtgtttgcaccctgccctgcccagtggtgtccacttaaaagctctggaaacctacgagattatctttaaaatcgtggggaccaaatggctggccaaggacttgtttctgtacagctgcgggttatttcctctcctggcacacgcggcggtgtcggtgaggccggtgctgctcaccctgtacgagaagtacttcctcccactgcagaagctgctcctgcccagtctgcaggccttcatcgtgggcctgctgcccggccttgaagagggctccgagatctccgacagaacggatgctctgctcctgagactgtcgctggtggttggcaaagaggtgttttacaccgccctctgggggagcgtcctggccagcccgtccatccgcctccctgcctcagtcttcgtggtgggccacatcaacagggatgcccccggccgggagcagaagtacatgctggggaccaatcaccaactcacggtgaagtctttgcgtgcctccctgttggactcaaatgttcttgtgcaaagaaataatctggaaatcgttctgtttttcttcccattttatacctgtctggattccaatgagagagccatccccctcctcagatctgacatcgtgcgcattctctcagccgccacccagaccctactgagaagggacatgtccctgaacagaagactgtatgcatggttactaggctcagacataaaaggaaataccgttgtgccagaatctgaaatctcaaattcttatgaagaccagtcgtcttatttttttgaaaaatactccaaggatcttttagttgagggtttggctgagatattgcatcagaagttcatagatgctgacgtggaggaacgccatcatgcatacctgaagccttttcgcgtcctcatcagtctgcttgacaagccagaaatagggcctcaagtggttgggaatttgtttctcgaagtcatcagggccttttattcttactgcagagatgcccttggctctgatcttaaacttagctacacccagagtggaaattcgctgataagtgcaatcaaggaaaacagaaatgcctctgagattgtcaaaacggtaaatttgctgataacttctctaagcacagactttctctgggattatatgacaaggtgttttgaggaatgctttagaccagtgaagcagcgttacagcgtgaggaacagcgtcagccctccccccacggtctcggagctctgcgccctcctggtcttcctgctggatgtcattcctttggaactttactctgaggtgcaaacccagtatctccctcaggtgctcggctgcctggtgcagcctcttgctgaggacatggaggccttaagtttacctgaactcacgcatgccttgaagacgtgtttcaaggtgctcagcaaagtccagatgcctccttcctacctcgacacggagtccaccagcggaacctcgagtccagtaaaaggtgaaaacggcaaaataattttggaaacaaaggcagtgattcccggtgacgaagatgcttcgtttccccctctgaagtctgaggacagtgggatcgggctcagtgcctcgtcaccggagctctctgagcacttgagggttcctcgagtttctctggaaagggacgacgtttggaagaagggcgggagcatgcagaggacgtttctttgcatccaagagctaatcgccaactttgccagcaagaacatttttggagtacagctgacagcgtcaggagaagaaagcaagtccgaggagcctgcagggaagagggacagggatgggacgcagagcctggcagccaatgattccagcaggaagaactcttgggagcccaagcccatcactgtgcctcagttcaagcagatgctgtcagacttgttcacagcacgagggtctccattcaagacaaaaagttcagagtcaccatcgtcttcgcccagcagccctgccaggaaaaacgggggagaatgggatgttgagaaggtggtcattgacctggggggttccagggaggaacgcagggaggcctttgccgccgcctgccacctgctgctggattgtgccactttccctgtctacctgtccgaggaagagaccgagcagctctgtgcaacgctcttccagctgccaggagccggtgattccagttttccatcttggctgaagtccctcatgactatttgctgctgtgtgactgactgctacctccagaacgtggccatttccactctgctggaagtgataaaccattcccagtccctggcgcttgtcattgaagacaagatgaaacgctataagagctctggacacaaccctttttttggcaagctgcagatggtgacggttcctcccattgctccagggatattgaaagtcattgcagagaaaacagatttctatcagagggtggctcgtgtgctttggaatcagctgaacaaagagacccgggagcatcacgtcacctgcgtagaattgttctaccggctgcactgcctggcccctacggccaacatctgcgaggacatcatctgccatgccctcctggaccctgacaagggaacaaggctggaagctctgtttagattttccgtgatctggcatctgacaagagagatccaaggcagtcgagtaacatctcacaatcgctcctttgataggtccttgtttgtcgtgctggacagcctggcctgcacggatggtgccatcggtgcggcagcccagggctggctggtgcgtgcgctctccctcggggacgtggctcgcatcctcgaacccgtgctcctgctgctgctgcagccaaaaacccagagaacctccatccactgcctcaagcaggagaactcggccgatgacttgcaccgttggtttaacaggaagaaaacctctttcagagaggcatgcgcagtgcccgagcctcaggagagcggctctgaagagcacctgcctctgagccagttcaccacagtggaccgtgaagccatttgggccgaagtggagaaggagcccgagaagtacccgctgcgaggcgagctgagcgaggaagagctgccctactacgtggagcttccagacaggacggcccacggcgccccggacagcagcgagcacaccgagtctgcagatacaagctcctgccacacggacagcgagaacacgtcctccttctcctccccttcccacgacctgcaggagctgagcaacgaagagaactgctgtgcacccatccccatggggggcagggcgtaccccaagcgctcggccctgctggcggccttccagtcagaaagcttcaaggctggggccaagttaagcctggtgcgggtggactcggacaagacgcaggcttctgagtcgttctccagcgacgaggaggcggacttggagctccaggccctcaccacatccaggctgctaaagcagcagcgggaaaggcaggaggccgtcgaggccttgttcaagcacatcctgctctacctgcagccctacgactctcggcgggtcctctatgccttctcggtgctggaggctgtgctcaaaaccaaccctaaggaattcatcgaggctgtgtccaggactagcatggataccagctccaccgcgcacctcaacctcatctccaacctcctcgctcgccaccaggaggccctcattggccagagtttctacggaaagctccagacccaggtccccaacgtgtgcccccactctctgctcctggagctgctcacctacctctgcctgagcttcctgcgctcctactacccttgctatttgaaggtctcgcaccgagacattctcggcaaccgggacgtgcaggtcaaaagtgtcgaggttttgatcaggataatgatgcagctggtctcagtggccaagtcttcggaagggaagaacgtggagttcatccacagcttgctgcagaggtgcaaagttcaggagtttgtcctgctctccctgtcggcgtccatgtacacgagccagaagcgctacgggctggccaccgcccaccacggcagggccctgccagaggacagcctctttgaggagagtctcattaacttgggtcaggaccagatctggagtgagcacccgctgcagattgagctgctgaagctgctgcaggtgctgattgtcttggaacaccacctgggtcgggcccatgaggaggcggaaaaccagcccgacctgtcccgggagtggcagagagccctgaacttccagcaggccatcagcgccctgcagtacgtgcagccccaccccctcacctcccagggtcttctggtctctgcggtggtgaggggtctgcagcccgcctacggttacggcatgcatccggcctgggtgagcttggtcacgcattccttgccctacttcggaaagtccctgggctggacggtgacaccctttgttgtccagatttgcaaaaacttggatgacttggtcaagcagtatgaaagcgaatctgtgaagctctctgtcagcacaacctccaagagggaaaacatttctccagattatccactcacccttctagaaggtctaacgaccattagtcatttttgtcttttggaacaagccaaccaaaacaaaaagaccatggctgcaggtgatcctgccaacttgaggaatgccagaaatgccattttggaagagctgcctcgaactgttaacaccatggcccttctctggaatgttctcagaaaggaggagactcaaaagagacctgtcgatctcctaggggccacgaagggatcctcttccgtttactttaaaaccaccaaaaccataagacaaaaaattttagacttcttaaaccccttgacggcccatcttggggttcagttgacagcggctgttgcggcagtgtggagcagaaagaaagcccagcgtcacagtaagatgaagattatcccaacggcaagtgcatcccagctaacccttgtcgacttggtgtgtgcactcagcaccctgcagactgacacgctgctgcacctggtgaaggaggtggtgaagaggccaccccaagtcaaagggggtgatgagaaatcgcccctagtggacattcctgtgttgcagttttgctatgcttttctccaaaggctcccagtaccagccttgcaagagaacttttcttcactgttgggagtattgaaagagtctgtacagttgaatctagccccacctgggtattttctgcttctcagcatgctgaatgactttgtaacaagaactcccaacctggaaaacaagaaggaccaaaaagacctgcaggaaatcactcagaaaatcctagaagctgtggggaacattgccggctcttccttggagcaaaccagctggctaagcagaaacctggaagtgaaggcccaacctcaggcctctctagaagaatctgatgctgaggaggacctgtatgatgctgctgcagcttcagcaatggtgtcttcatccgccccgtcggtgtacagcgtgcaagccctctctctcctggcagaggtactggcttccctcctggacatggtttatcgaagtgatgagaaggagaaagctgtgccgttaatctcccgtctgctttactatgtttttccatacttacgcaaccacagtgcctacaatgctcccagcttccgggctggcgctcagctgctgagctccctgagtggctatgcctacacaaagcgagcctggaggaaggaggtcctggagctgtttctcgaccccgctttctttcagatggatacttcctgtgttcattggaagtccattattgaccatcttttgactcatgagaaaacaatgtttaaggatttaatgaacatgcagagcagttctttgaaactattctcaagttttgaacagaaagccatgctgttaaagcgccaggcttttgctgtcttcagtggagaacttgatcaataccacctttaccttccactgatacaagaacgcctgacagacaatctcagagttggacagacatccatagttgctgctcagatgtttctttttttcagagttttgctgctaagaatatctcctcaacatttgacttcattgtggccaataatggtctctgaattgattcagacattcacacagcttgaagaagatctaaaagatgaagatgagtcattgagaagcaccaacaaagtaaacagaacgaaagtttcagtcccggatgcaaatggaccctcagtgggggagataccccagagtgaactcatcttgtatttatcagcttgcaaattcttggacacagcgctttcttttccacctgacaagatgccattatttcaaatttataggtgggcatttattccagaagtggacacagagggccctgccttcctgtcggatgtagaggagaatcaccaagaatgcaaaccccacactgtcaggattctagaacttctaaaattaaagtttggggaaatcagtagctctgatgagatcaccatgaagagtgaattcccgcttctgcgccaacattctgtttccagcatcaggcagttgatgccattcttcatgactctaaatggtgcatttaagacccagagacagctgcctgctgatagcccaggaactccattcttggactttcctgtcacagatagcccaaggatcttaaaacaactggaagaatgcatcgaatatgattttctggaacatccagaatgttaaccatgtgagagagaatatgtttaatccatgtattggtactttactgaaaaccaggttatattctaaagaagaaagaaggcaggatagtgcttttgaacaagcctatttccattttgaaagtagatttcaggctaggtgcggtggctcacacctgtaatctcagcactttgggaggccaaggcaggctaaggcatgagaattgcttgaacccaggaggtggaggctgcagtgagccgagatcacgacactgcactccagctgtgt

SEQ ID NO: 350 - protein, 2280 aa, Homo sapiens
MDPEEQELLNDYRYRSYSSVIEKALRNFESSSEWADLISSLGKLNKALQSNLRYSLLPRRLLISKRLAQCLHPALPSGVHLKALETYEIIFKIVGTKWLAKDLFKCGLFPLLAHAAVSVRPVLLTLYEKYFLPLQKLLLPSLQAFIVGLLPGLEEGSEISDRTDALLLRLSLVVGKEVFYTALWGSVLDSIRLPASVFVVGHINRDAPGREQKYMLGTNHQLTVKSLRASLLDSNVLVQRNNLEIVLFFFPFYTCLDSNERAIPLLRSDIVRILSAATQTLLRRDMSLNRRLYAWLLGSDIKGNTVVPESEISNSYEDQSSYFFEKYSKDLLVEGLAEILHQKFIDADVEERHHAYLKPFRVLISLLDKPEIGPQVVGNLFLEVIRAFYSYCRDALGSDLKLSYTQSGNSLISAIKENRNASEIVKTVNLLITSLSTDFLWDYMTRCFEECFRPVKQRYSVRNSVSPPPTVSELCALLVFLLDVIPLEKEVQTQYLPQVLGCLVQPLAEDMEALSLPELTHALKTCFKVLSKVQMPPSYLDTESTSGTSSPVKGENGKIITKAVIPGDEDASFPPLKSEDSGIGLSASSPELSEHLRVPRVSLERDDVWKKGGSMQRTFLCIQELIANFASKNIFGVQLTASGEESKSEEPAGKRDRDGTQSLAANDSSRKNSWEPKPITVPQFKQMLSDLFTRSPFKTKSSESPSSSPSSPARKNGGEWDVEKVVIDLGGSREERREAFAAACHLLLDCATFPVYLSEEETEQLCATLFQLPGAGDSSFPSWLKSLMTICCCVTDCYLQNVAISTLLEVINHSQSLALVIEDKMKRYKSSGHNPFFGKLQMVTVPPIAPGILKVIAEKTDFYQRVARVLWNQLNKETREHHVTCVELFYRLHCLAPTANICEDIICHALLDPDKGTRLEALFRFSVIWHLTREIQGSRVTSHNRSFDRSLFVVLDSLACTDGAIGAAAQGWLVRALSLGDVARIPVLLLLLQPKTQRTSIHCLKQENSADDLHRWFNRKKTSFREACAVPEPQESGSEEHLPLSQFTTVDREAIWAEVEKEPEKYPLRGELSEEELPYYVELPDRTAHGAPDSSEHTESADTSSCHTDSENTSSFSSPSHDLQELSNEENCCAPIPMGGRAYPKRSALLAAFQSESFKAGAKLSLVRVDSDKTQASESFSSDEEADLELQALTTSRLLKQQRERQEAVEALFKHILLYLQPYDSRRVLYAFSVLEAVLKTNPKEFIEAVSRTSMDTSSTAHLNLISNLLARHQEALIGQSFYGKLQTQVPNVCPHSLLLELLTYLCLSFLRSYYPCYLKVSHRDILGNRDVQVKSVEVLIRIMMQLVSVAKSSEGKNVEFIHSLLQRCKVQEFVLLSLSASMYTSQKRYGLATAHHGRALPEDSLFEESLINLGQDQIWSEHPLQIELLKLLQVLIVLEHHLGRAHEEAENQPDLSREWQRALNFQQAISALQYVQPHPLTSQGLLVSAVVRGLQPAYGYGMHPAWVSLVTHSLPYFGKSLGWTVTPFVVQICKNLDDLVKQYESESVKLSVSTTSKRENISPDYPLTLLEGLTTISHFCLLEQANQNKKTMAAGDPANLRNARNAIELPRTVNTMALLWNVLRKEETQKRPVDLLGATKGSSSVYFKTTKTIRQKILDFLNPLTAHLGVQLTAAVAAVWSRKKAQRHSKMKIIPTASASQLTLVDLVCALSTLQTDTLLHLVKEVVKRPPQVKGGDEKSPLVDIPVLQFCYAFLQRLPVPALQENFSSLLGVLKESVQLNLAPPGYFLLLSMLNDFVTRTPNLENKKDQKDLQEITQKIAVGNIAGSSLEQTSWLSRNLEVKAQPQASLEESDAEEDLYDAAAASAMVSSSAPSVYSVQALSLLAEVLASLLDMVYRSDEKEKAVPLISRLLYYVFPYLRNHSAYNAPSFRAGAQLLSSLSGYAYTKRAWRKEVLELFLDPAFFQMDTSCVHWKSIIDHLLTHEKTMFKDLMNMQSSSLKLFSSFEQKAMLLKRQAFAVFSGELDQYHLYLPLIQERLTDNLRVGQTSIVAAQMFLFFRVLLLRISPQHLTSLWPIMVSELIQTFTQLEEDLKDEDESLRSTNKVNRTKVSVPDANGPSVGEIPQSELILYLSACKFLDTALSFPPDKMPLFQIYRWAFIPEVDTEGPAFLSDVEENHQECKPHTVRILLKLKFGEISSSDEITMKSEFPLLRQHSVSSIRQLMPFFMTLNGAFKTQRQLPADSPGTPFLDFPVTDSPRILKQLEECIEYDFLEHPEC

SEQ ID NO: 351 - DNA, 7640 bp, Homo sapiens
ttcatctcccacagtgcctggcccagaagccttgctaaatatttgaacaggattgcccaatacttttctgctgtgagaatgtaagatggatccagaagagcaggagctcttaaatgattacagatacagaagctactcttcagtgattgaaaaggctttgagaaattttgagtcctcgagtgaatgggcggatctcatatcttcacttggcaaactcaacaaggctcttcagagtaacctgaggtactccttgttgccaagacggctcctcatcagcaaaagattagctcagtgtttgcaccctgccctgcccagtggtgtccacttaaaagctctggaaacctacgagattatctttaaaatcgtggggaccaaatggctggccaaggacttgtttctgtacagctgcgggttatttcctctcctggcacacgcggcggtgtcggtgaggccggtgctgctcaccctgtacgagaagtacttcctcccactgcagaagctgctcctgcccagtctgcaggccttcatcgtgggcctgctgcccggccttgaagagggctccgagatctccgacagaacggatgctctgctcctgagactgtcgctggtggttggcaaagaggtgttttacaccgccctctgggggagcgtcctggccagcccgtccatccgcctccctgcctcagtcttcgtggtgggccacatcaacagggatgcccccggccgggagcagaagtacatgctggggaccaatcaccaactcacggtgaagtctttgcgtgcctccctgttggactcaaatgttcttgtgcaaagaaataatctggaaatcgttctgtttttcttcccattttatacctgtctggattccaatgagagagccatccccctcctcagatctgacatcgtgcgcattctctcagccgccacccagaccctactgagaagggacatgtccctgaacagaagactgtatgcatggttactaggctcagacataaaaggaaataccgttgtgccagaatctgaaatctcaaattcttatgaagaccagtcgtcttatttttttgaaaaatactccaaggatcttttagttgagggtttggctgagatattgcatcagaagttcatagatgctgacgtggaggaacgccatcatgcatacctgaagccttttcgcgtcctcatcagtctgcttgacaagccagaaatagggcctcaagtggttgggaatttgtttctcgaagtcatcagggccttttattcttactgcagagatgcccttggctctgatcttaaacttagctacacccagagtggaaattcgctgataagtgcaatcaaggaaaacagaaatgcctctgagattgtcaaaacggtaaatttgctgataacttctctaagcacagactttctctgggattatatgacaaggtgttttgaggaatgctttagaccagtgaagcagcgttacagcgtgaggaacagcgtcagccctccccccacggtctcggagctctgcgccctcctggtcttcctgctggatgtcattcctttggaactttactctgaggtgcaaacccagtatctccctcaggtgctcggctgcctggtgcagcctcttgctgaggacatggaggccttaagtttacctgaactcacgcatgccttgaagacgtgtttcaaggtgctcagcaaagtccagatgcctccttcctacctcgacacggagtccaccagcggaacctcgagtccagtaaaaggtgaaaacggcaaaataattttggaaacaaaggcagtgattcccggtgacgaagatgcttcgtttccccctctgaagtctgaggacagtgggatcgggctcagtgcctcgtcaccggagctctctgagcacttgagggttcctcgagtttctctggaaagggacgacgtttggaagaagggcgggagcatgcagaggacgtttctttgcatccaagagctaatcgccaactttgccagcaagaacatttttggagtacagctgacagcgtcaggagaagaaagcaagtccgaggagcctgcagggaagagggacagggatgggacgcagagcctggcagccaatgattccagcaggaagaactcttgggagcccaagcccatcactgtgcctcagttcaagcagatgctgtcagacttgttcacagcacgagggtctccattcaagacaaaaagttcagagtcaccatcgtcttcgcccagcagccctgccaggaaaaacgggggagaatgggatgttgagaaggtggtcattgacctggggggttccagggaggaacgcagggaggcctttgccgccgcctgccacctgctgctggattgtgccactttccctgtctacctgtccgaggaagagaccgagcagctctgtgcaacgctcttccagctgccaggagccggtgattccagttttccatcttggctgaagtccctcatgactatttgctgctgtgtgactgactgctacctccagaacgtggccatttccactctgctggaagtgataaaccattcccagtccctggcgcttgtcattgaagacaagatgaaacgctataagagctctggacacaaccctttttttggcaagctgcagatggtgacggttcctcccattgctccagggatattgaaagtcattgcagagaaaacagatttctatcagagggtggctcgtgtgctttggaatcagctgaacaaagagacccgggagcatcacgtcacctgcgtagaattgttctaccggctgcactgcctggcccctacggccaacatctgcgaggacatcatctgccatgccctcctggaccctgacaagggaacaaggctggaagctctgtttagattttccgtgatctggcatctgacaagagagatccaaggcagtcgagtaacatctcacaatcgctcctttgataggtccttgtttgtcgtgctggacagcctggcctgcacggatggtgccatcggtgcggcagcccagggctggctggtgcgtgcgctctccctcggggacgtggctcgcatcctcgaacccgtgctcctgctgctgctgcagccaaaaacccagagaacctccatccactgcctcaagcaggagaactcggccgatgacttgcaccgttggtttaacaggaagaaaacctctttcagagaggcatgcgcagtgcccgagcctcaggagagcggctctgaagagcacctgcctctgagccagttcaccacagtggaccgtgaagccatttgggccgaagtggagaaggagcccgagaagtacccgctgcgaggcgagctgagcgaggaagagctgccctactacgtggagcttccagacaggacggcccacggcgccccggacagcagcgagcacaccgagtctgcagatacaagctcctgccacacggacagcgagaacacgtcctccttctcctccccttcccacgacctgcaggagctgagcaacgaagagaactgctgtgcacccatccccatggggggcagggcgtaccccaagcgctcggccctgctggcggccttccagtcagaaagcttcaaggctggggccaagttaagcctggtgcgggtggactcggacaagacgcaggcttctgagtcgttctccagcgacgaggaggcggacttggagctccaggccctcaccacatccaggctgctaaagcagcagcgggaaaggcaggaggccgtcgaggccttgttcaagcacatcctgctctacctgcagccctacgactctcggcgggtcctctatgccttctcggtgctggaggctgtgctcaaaaccaaccctaaggaattcatcgaggctgtgtccaggactagcatggataccagctccaccgcgcacctcaacctcatctccaacctcctcgctcgccaccaggaggccctcattggccagagtttctacggaaagctccagacccaggtccccaacgtgtgcccccactctctgctcctggagctgctcacctacctctgcctgagcttcctgcgctcctactacccttgctatttgaaggtctcgcaccgagacattctcggcaaccgggacgtgcaggtcaaaagtgtcgaggttttgatcaggataatgatgcagctggtctcagtggccaagtcttcggaagggaagaacgtggagttcatccacagcttgctgcagaggtgcaaagttcaggagtttgtcctgctctccctgtcggcgtccatgtacacgagccagaagcgctacgggctggccaccgcccaccacggcagggccctgccagaggacagcctctttgaggagagtctcattaacttgggtcaggaccagatctggagtgagcacccgctgcagattgagctgctgaagctgctgcaggtgctgattgtcttggaacaccacctgggtcgggcccatgaggaggcggaaaaccagcccgacctgtcccgggagtggcagagagccctgaacttccagcaggccatcagcgccctgcagtacgtgcagccccaccccctcacctcccagggtcttctggtctctgcggtggtgaggggtctgcagcccgcctacggttacggcatgcatccggcctgggtgagcttggtcacgcattccttgccctacttcggaaagtccctgggctggacggtgacaccctttgttgtccagatttgcaaaaacttggatgacttggtcaagcagtatgaaagcgaatctgtgaagctctctgtcagcacaacctccaagagggaaaacatttctccagattatccactcacccttctagaaggtctaacgaccattagtcatttttgtcttttggaacaagccaaccaaaacaaaaagaccatggctgcaggtgatcctgccaacttgaggaatgccagaaatgccattttggaagagctgcctcgaactgttaacaccatggcccttctctggaatgttctcagaaaggaggagactcaaaagagacctgtcgatctcctaggggccacgaagggatcctcttccgtttactttaaaaccaccaaaaccataagacaaaaaattttagacttcttaaaccccttgacggcccatcttggggttcagttgacagcggctgttgcggcagtgtggagcagaaagaaagcccagcgtcacagtaagatgaagattatcccaacggcaagtgcatcccagctaacccttgtcgacttggtgtgtgcactcagcaccctgcagactgacacgctgctgcacctggtgaaggaggtggtgaagaggccaccccaagtcaaagggggtgatgagaaatcgcccctagtggacattcctgtgttgcagttttgctatgcttttctccaaaggctcccagtaccagccttgcaagagaacttttcttcactgttgggagtattgaaagagtctgtacagttgaatctagccccacctgggtattttctgcttctcagcatgctgaatgactttgtaacaagaactcccaacctggaaaacaagaaggaccaaaaagacctgcaggaaatcactcagaaaatcctagaagctgtggggaacattgccggctcttccttggagcaaaccagctggctaagcagaaacctggaagtgaaggcccaacctcaggcctctctagaagaatctgatgctgaggaggacctgtatgatgctgctgcagcttcagcaatggtgtcttcatccgccccgtcggtgtacagcgtgcaagccctctctctcctggcagaggtactggcttccctcctggacatggtttatcgaagtgatgagaaggagaaagctgtgccgttaatctcccgtctgctttactatgtttttccatacttacgcaaccacagtgcctacaatgctcccagcttccgggctggcgctcagctgctgagctccctgagtggctatgcctacacaaagcgagcctggaggaaggaggtcctggagctgtttctcgaccccgctttctttcagatggatacttcctgtgttcattggaagtccattattgaccatcttttgactcatgagaaaacaatgtttaaggatttaatgaacatgcagagcagttctttgaaactattctcaagttttgaacagaaagccatgctgttaaagcgccaggcttttgctgtcttcagtggagaacttgatcaataccacctttaccttccactgatacaagaacgcctgacagacaatctcagagttggacagacatccatagttgctgctcagatgtttctttttttcagagttttgctgctaagaatatctcctcaacatttgacttcattgtggccaataatggtctctgaattgattcagacattcacacagcttgaagaagatctaaaagatgaagatgagtcattgagaagcaccaacaaagtaaacagaacgaaagtttcagtcccggatgcaaatggaccctcagtgggggagataccccagagtgaactcatcttgtatttatcagcttgcaaattcttggacacagcgctttcttttccacctgacaagatgccattatttcaaatttataggtgggcatttattccagaagtggacacagagggccctgccttcctgtcggatgtagaggagaatcaccaagaatgcaaaccccacactgtcaggattctagaacttctaaaattaaagtttggggaaatcagtagctctgatgagatcaccatgaagagtgaattcccgcttctgcgccaacattctgtttccagcatcaggcagttgatgccattcttcatgactctaaatggtgcatttaagacccagagacagctgcctgctgatagcccaggaactccattcttggactttcctgtcacagatagcccaaggatcttaaaacaactggaagaatgcatcgaatatgattttctggaacatccagaatgttaaccatgtgagagagaatatgtttaatccatgtattggtactttactgaaaaccaggttatattctaaagaagaaagaaggcaggatagtgcttttgaacaagcctatttccattttgaaagtagatttcaggctaggtgcggtggctcacacctgtaatctcagcactttgggaggccaaggcaggcagatcacttgaggtcaggagttcgagaccagcctgaccaacatggtgagaccctgtctctactaaaaatacaaaaattagctgggtgtggtggcggcgcctgtaatcccagctacttgggaggctaaggcatgagaattgcttgaacccaggaggtggaggctgcagtgagccgagatcacgacactgcactccagctgtgtgacagaatgagaccatctccaaaaaaaaaaaaaagtagatttcagataatttactgttcagcaacaggacacacctccctaaatgccttgtaatatatttgaatctgattctgcatttcttcctcaatttatgtaatgaaaataaaattaatatatcatctaacagtagcacaaaatttgtaatatgaagtaaagtatgaagataatgaagaagttgttttctttgttgaagcagttatatgggtctttctcagtatatttctcttttct

SEQ ID NO: 352 - protein, 2280 aa, Homo sapiens; identical to SEQ ID NO: 350

SEQ ID NO: 353 - DNA, 98822 bp, Mus musculus
  misc_feature (1)...(98822): n = A,T,C or G
atgagctgccaatccacagcacctcctattgtagctagaaaagggtgggatgaagatggcttttacatctctaggacggaggtgttagaagctggatcagggactggatcagaggatcaggggaggtaaggtaatttgtatgaggaattagagctgcagatacttatgaaagctatggggaaggaccaacctagagcagtgattcatgcagataaagatggtaggctacccaatcagggagtctaatacataagtttgaagattttgttctctctctagtgtaatctctgtcatataaccctatatttagacaagaaagaattcactatagaggctgagcagtggtgctccaggaacttgtctactgtggggtagattcatgataacctacttaaggcggcagccactagaagaaggaagagtcaacacagaatgcaaagcatggtattttgtttttatttttcaagctacttcatctgggatttaatgggtaagttacagttaatttttaaaaatttatttatttatttacaccccaaatgctgctgcccctcctactggtcttcccttcatggagttcctcctgtcctctcccactgacacaggacaaggtatgcagcagccctctgctacatatgtgccggggtccttggtccagcccaggtatggtgtttgcttggtggctcagcctctgagagctcccaggggtccaggatttttgacacagttagtctttcagtagggttcctatccccttcagggccttcaatcccataagggtcctggaagtggttatctgcatctttttggtcagctgctgggtggagcttctcagaggacagtcatgctaggcttctgtctgtaagcttaacagagaatcattaatagtgtcaggaattggtgcttgcctaagggatgggtctcaagttggaccagctattggttggtcattccttcattctctgctccatttggccctgcatttctcttagacaggacacattttgggttgaaagttttgtgggtgggttggtgtccttagccctccactggggtccttcctgactacaggaggtagtgtcttcaggtccatgtccccactgataggcatctccactaggttaccctcattgactcctgggagcctcccctatctcagttctcagggacagcctagaaatccactccccccatctctggcagctgcagatttccatttattatcctggtcttctgggccttactcttgtctctggccacacctgatcctgtcctcctgtttccctcatgctcctctctcccatccactttcctccctccccttgcctccctttactattatgtttcccttctaagtgggatacaagcatcctcacttgggtcttcttgtttaacttctttgggtctgtgggtgtatcatgagtatcctgttttttatggctaatatccacttagtagtgagtacataccatgcatatatttttgggtctgggttacctcagtcaggatgatattttctagttccatccacttgcctgaaaaattcttgatggtcttgtttttaatagctgattagtattccattgtgtaaatgaaccacactctctgtatccatttttccattaagggacatctggattgtttccagcttctggctattatgaataaggctgttatgaacataatggagcatgtgtccttgtggtatggtggagcatcttttagatatatgtccaggagtggaatagctggatctttaggtagaaccatttccaagtttttgagaaaacaccagattgatttccagagtggttgttgcaatttgcaatcccaccaacaatggagaaatgccctctttctccacattcttgccagcccatgctgtcatttgaatttttgatattagctattctgattggggcaaggtggaatctcaaggtcattctcatttgcttttccctgacagctaagcttgttgtacatggtgttcataatctgttgtttaacaaaaggataaattgttgtaattctcagaaaggattattgtatcaacttcaacaagtttaaaatcatgtctttaaattatcttgttaatttagattagcatctgatgatcaatggctatgtgaaaactcttttaactgttccagatgtttcatttaactcatcagcaaatcacagagactcagggatccactcaactcatgccactttcacaatcacacagaagtgagaggtctatatctcaacatcacagatcaggaaccagaccgatgaagttctagagctgactgtgacagtcagccaataagtggtatatctagaagttagataaaggtttcttcaagagtttttatgagtaattagaaagtgtaagtattaagtattttatatttatgagtaattagaaagtataagtattagaaagtataagtattaagtattttatatttatgagtaattagaaagtatacgtattaagtattttatattatttgtgactattgagaagggtgttgtttccctaatttctttctcagcctgtttatcctttgtgtacagaaaggccattgacttgtttgaattaattttatatccagatacttcattgaacctgtttatcaggtttaggagttctctgtggaatttctagggtcacttatatatcctatcctatcatttgcaaaaagtgatattttgacttcttcctttccaatttgtatccccttgatgtccttttgttgtggaattgctttggctaggacttcaagtacaatgtggactatgtagggagaaagtgggcagccttgtctagtccctgattttagtgggattgcttccatcttctcaccatttactttgatgttggctactgtttgctgtagattgcttttatcatgtttaggtatgggccttgaattcctgatctttccaagactttatcatgaatgggtattggattttgtcaaatgctttctccgcatctaaggagatgatcatgtggttttttttttttcattgagtttctttatataatggattatgttgatggatttccgtatattaaaccatccctgcatccctggaataaaacctacttggtcaggatggatgattgttttgatgtgttcttggattcggttaggaagaaatttattgaggatttttgcatcgatattcataggggaaattgttctaaagttctctatctttgttgggtctttctgttgtttaggtatcagagtaattgtggcttcatagaatgagttgggtagagtacattctgcttctattttgtggaatagtttttgaaaaactggaattagatcttctctgaaggtctgatataagtctgcactaaacccatctggtcctgggctttttttggttgggagactattaatgactgcttctatttcttaaggggatataggactgtttagatcattaacctgatcctgatttaactttgttacctggtatctctctagaaacttgtccttttcattcaggttctccagttgtgttgagtatagcctttcatagaaggatctgatggtgttctggatttcttcaggatctgttgttatggctcccttttcatttctgagtttgttaattaggatgcagtccctgtgccctttagtgagtctggctgagggtttatttatcttgttgattttctcaaagaaccagctcctcctttggttgattctttgaatagttctttttgtttccactcggttgatttcagccctgcgtttgaatatttcctgccatctactcctcttgggtgaatttgcttctttttgttctagaacttttagttgtgctgtcaagctgctagtgtgtgctctctctagtttctttttggaggcactcagcgctatgagttttcctcttagaaatgctttcattgtgtcccataagtttgggtatgttgtggcttcattttcattaaactctaaaaagtccttaatttctttctttattccttccttgatcaaggaatcatcgagaagagtgttgttcagtttccatgtgaaagttggctttctattatttatgtttttattgaaaatcagccttagtccatggtgatctgataggatgcatgggacaatttcaatatttttgtatctgttgaggcctgttttgtcaccaattatatggtcaattttggagaaggtagcatgaggtgctgagaaggtatatgcttttgttttaggataaaatgttctgtagatatctgtcagatccatttgtttcataacttctgttagtttcactgtgtccgtgtttagttcctgtttccatgatctgtccattgattaaagtggtgtgttgaagtctcccagtattatcgtgtgaggtgcaacgtgtgctttgagctttagtatagtttctttaatgaatgtggctgcccttgtatttggagcatagatattcagaattgagagttcctcttggaagattttacctttgatgtgtttgaagtgcccctccttgtcttttttgatgactttgggttgtatgtcgattttattacatattagaatgtctactccagcttgttccttcagaccatttgcttggaaaattgttttcctccctttcattctgaggtagtgtctgtctttttccctgagattggtttcctataatcagtagaatgttgagtcctgtttgtgtagccagtctgttagtctatgtgtttttattggggaattgagtccattgatattaagagatattaaggaaaagtaattgttgtttcgcattattattattattattattattattattattatttttgttaaagttggcattctgttcttgtggctgtcttttatgtttgttgaaggattaatttcttgctttttctaggacgttgtttctgtctttttattgttttttttttctgttattatcctttgaagggctggattcttggaaagataatgtgtgaatttggttttgtcatgaaatactttggtttatccatctatggtaattgaaagtttggctgggtatagtagtctgggctggcatttgtgttctcttagggtctgtataacatctgtccaggatcttctggctttcatagtctctggtgaaaaatctggtgtaattctgataggcctgactttatatgttacttcacctttttaccttactgcttttaatattctttctttatttagtgcatttgttgttctgattattatgtgtcaggaggaatttcttttctggtccagtctatttggcgttctgtagacttcttgtatgttcatgggcatctctttctttaggtttgggaagttttcttctataattttgttgaagatatttgctggccctttaagttgaaaatcttcattctcatctactcctattatccgtaggtttggtcttctcattgtgtcctggatttcctggatgttttgagttaggatttttgcattttgcattgtctttgattgttgtgctgatgttctctatggaatcttctgcacctgagattctctcttccatctcttgtattctgttgctgatgctcgcatcaatggttccagatttctttcctaggatttctatctccagctttgcatcacttcggcttttttttttattgtgtccacttccctttttaccatattgtgtctagtatggttttgttcatttccatcacctgtttggatttgttttcctctttttctttaaggacttgtaactctttagcagtgttctcctgtatttctttaagtgagttattaaagtccttcttgatatcctctaccatcatcatgagacatgcctttaaatccgggtctagcttttcgggtgtgttggggtacccaggactgggtgaggtgggagtgctgtgttctgatgatggtgagtggtcttggtttctgttagtaagattcttacatctatgtgtgtccaggacaaaaaggctagtgagtttggagtttggtagtctctatggtttcctgtatctactcaggatcttgcgatatattgcttgtggcaagaaagtactattatatattgtattattcattataaattgaatttaatacttaaattagttccattttatacaaaatgtttgcagttttaagatttatcatatatagtagttttcctctaatttactataaaatgttttactgtatatatgactatatgtaacttgaagaattgccaagtttaccttatattgtcttcagagaaataccaaaagtaccaaaaaaccttcctccagtctgttgttgaaatactcatgtagtgtatgacttctatcagactggttgaaatgctcatgtcaatatcaccaacaaaagggccaagccagagaacttagagctatggttcatcaggtggaaaggtggacaaatattccaatgcctaccaattaatcagaagagccattcaaagtacaaggtgattgtcccaaggtcaattggattgatggcttcacacaaaccatgatgagtgactaggggatgtggggaagtaattcttagctttatgaggagactttgccggctgggtaactccttctaggccttatattaatttgctttgcaactctctcagtcctcttagtgaactattatgtttctcatggcagttcatattcataaccccaaacctctcaggggcctgtttgattcttcagttgtcttgcaaccatttaggcaggctcaggagtctaaaagttctctctctctctctctctctctttctttctttctttctttctttctttctttcaaactgtcattgcccttgaaattttattggatttttagtactggttttgtattgcctgcgtttaaactttctttgttagactaaagttatactttgtatttgtttattatttatatgagccatgcatggtaccatgttcctataatcccagacctagggaggtggaggcaagtggttcagaggttcaagacaaatctcaacccatctcacttagcctgtagatagaaaagacagaaaagatggaaacctggagacctctttgtttggactaggaggtagagctttcatatatgactggaaaggatttcttggctacataacgagctggtctacatgagagtccatcaaaataaaataccaacaaaacaaaatagtcaaacaaatgaaagtcatcttcccaataaataatgacatcttattctggagaaaaatatgtttttattagcatatacttatgtattttaccattgagcactatacaatgagcttctattttattagaaattactgttaatctcttaataatcacatgtaatctcttgtactaacatgtttatctagtatgtctaattataagttaaaatttatcattaatattcatgcatgtatgtttatggggaaaagttagaatgtttgggtttggtagtttttgaggttcctagcatctaccatgggtcttgggatgtattccttgtggaaagtgtggactactgtgtattgcactattcatcatgtgttgaatttattgcttaaatcagttgcagtgtacataaaatgtctgcagttataagttttattacacattatactttttcttggatttactctaagatgtcttgttatatatgagagtttaataaatgatttccgtgacaattaccaaaagtcagatcacttaaagaagtctgctgaagctgacatatactgctctgggattgctaggtgtaattagtgagattcaagctgtaatagttgcttcaaacttttaattcaggtttagagtggcctattaggcaggatagcattgtctgtgacaatcttaagtatggtactagctggcagctcaagatgaaagggctgcctttccctaaaagccagaatgaggaagctatagtagcatgctggaagtttaatctttaaggttagtgaaaatgggaattataagatataaaatatttacagttgagagagagagagacagagacagagacagagacagaaaggaggaattgttgagggaggatagagacaaactgaaggaatatagacattctatctaactgacttaactttccaggtagaaataaaaataagtctatttctaggatatatatatatatgtatatatatatatttgtcataaatgaatactttgaggatgctaataagtagaactttagaagcacagactcaattggatttgtaatattctttctttctctctctctctctctctctctctctctctgtctctctagcttttggacaagtacagattacaaataaatctaaacatggtgctcttttcttctttctctcttgtgctacatacatgatgtactcaccaaagttccctttgcaccttatctcagaagaagtcaaaatatattttagaaatagaggagaagaatgtcagtggactggggaaaaaagtgtgactcaaaacacaagtcaaagacagaataaaagaccaggaaaacacacggcttctaaaaatacgttccatggttagacagctttgatggtcaggaggatttcttgaggttctttctacctattgatttgtttgccctgaggagtgttaaaactcagtaaagcccttgtccagtgggccaacaaatcatccttcaagctgaaatcagatcggcccaaatctggaaggagtgaaaacatgtttggaaatctagcagatgtgtagtaaaagttactgctgttagccagaagtcacattccccatcacatctaagtcgcttcagcagtaagtggttaacatactagtacgttcacaggcagctttactgaatctctctccttgcctggagatatgtcctccaacattggacttagtgctctacacctaaatcatcttttattttgtctaacatttaggaggatttctggtagttcaaactgagggaagggtacaagatttctgtcttggggattttgtgtctgtctcataagagtttgcctatggggagtgagtgctaatgtagaggcaacgacttcagcaggccaaagatgctttcacctggaggcttttcctgacttgctcttttccacagccattagtcaggcagcatgtgtgtgtgacagagctagggtgtggagcatgctttcattataaccttgttagataggccgtgcatgagtaactagtaaatgtgtcttcaaacctttgatgcagtcaacattggccactaaaaggaacccaaggtatgcatgattggtttcccaccccgcccccaacaagtcttgttttttatctccatgttcccaatcccattgaatgtgaacatcttgagcagatggagggagtatgaacacatctttggagtcattttaaaattccttgaaaacccagattgctgtagaatagcaaagacagagagaaggagaaatggagagaaaccacagccagtaggctcaggctgtcccctgtgatgaactctcttggctggcaactgggaaccaaagaacactgttctcatctcttcatagctctgcatcatgaaactgtcacttaagacacattttatctctcttaggattagcagaatgggtcaaggccatagcaaagtgtttgttattgtcttctcttagcagatctttgacatcaccatttcaccatgcaccagaattatcccctccccgttctgccaaccctgagctcccctcctgctctgctttgagtcctgcttatattcaggaactgatgatggtttctgactggtcatttcttacctgcctttgggcttgggtctgaataaggaaaaacaatagcttgagggtgatgggaggtggacttgtctttaagagaattctagcaagaggctgtggttaaaaataagtctttagagctccgtgcatctagtaaaattttctttttaaaagtctgtaatgtttggaacactagaaaccaagacaaagtaaactttaccattccccccaattcgcagcacaggtgactttttgtggggcatctcagcttccctgaagatgaaccagggttatattctgtgcagttatcagtgactgttagggcatgttgagacgttgggtgtgtagttccttgcaactaccacacttccttcacccacccagctagttctgatccctctattgattgcatctggccgtttctaaagttatactagatttgcagatagatgtgatggcttactaatactttttgttctgtggagctgacattttcgcttatctgttggacaatcacaggccactttttttttcagttgtaaaatatcgaatgagactgtgatacattttctagagtcctatcctggtttgtattggtgccatggataggtattttcaactggattttaatctctctctctctctccctctctctctctgcatgtgtgagtgaacatgtttgtcatgtgtaagtgtatttggttggcaaaacagctataatactgcactttagaccaatggtgctttggttgcaaaaaatgagagcaatttgaagttattaacttttggcttcttttgtaggaggaaccaatttttttgtaaatgttgacaccagtaggaagtgaatagagctaaatgaacaagggagagggatgagtttgactttcaaccttttagccatgaggcatcggatgaaaatatagcttagtgatcagcggggggagtattgtatacattgaataatttgaataatttggctgtcccaactcaagagatactaatttttgtgtcaagtgatatttattaggtgtggcagttactgcagtagacaaggtccaggactagacgtcacagactatggggagatgaaaacgaggaaataggtgaacataaaatatacaatcaggcttcacaagagatatgagaagtgataaagcagagacgtgaatggggtacaaaagtcatccttgataatacatgcaggatggagagaatgtgaggaaggaaaagagggagggaagacagagaaaggggagagtagaagagggagagatgagaaggggaggagaaggagaacacagtgggtggaagaggaggagggagaggaggaggaggagacagctgggctatatcatggagactttgatctctgctagctgcaaaaccttggaaggtttcaaaatgtggaatgggtatcatctgacatctgggtctcaaagatcactggggcaccattgcctttacagatcactggccatatatcattggtagcataaaacactgtattctctgaacaattatcaggaaatctcatgatactttacatgaaaatctaatagctaaagactccagaactgcctggaaaaagcaacaattgggacaaccatgaaatagatgactatatctaatggctcctaactagcagggaaagaaactgtattttaaaaatagaatgccaagaaaatacatatccttacctgatctgcttgtcatatatgcacttccacagaagtgtcaggagcctgctggttctcagctgcttatcatttttcctaggtgctgagtcagacaaagggccctgggtgatgactgaatcacatgaaacttgtctctgccgttactagtgaatgatgcctctaaataagtgcaaacaaggacaccgtgtaagtcacttcttagaggcttgaatgaggacaaaatgagtcagtcgagaaacatcattctttacagtataagcactcaatgagagttacctagccattcaacccaggtagaggaccgtgatttgagatgtagctctcaatactgaagtgatagtatattagtactagattatagtctagctaggagcctgaatttgattcctaagttttgggaatggcctctggctttttgctggataaaagatttattttaaaacataatgtttagaatgtgggattttaaaaaatacacatcactggggaaatataattaggatgtgagcatttctttttgatcatatttgttctataaccatatatatgtaaatatatattactatattactaacataaagtattactaatatgtatttagtaatatagcaatatactgacacatatgtgtatatattagtaatatattaatatactgatatatatgtacatatatatatacacacatatatattagtaatatagtttgtttgctgtaatgtgtatgatttaagtaactgacttaaaatttacattgaatttgctatcagtcttgaacaattctaaaactcaccatttcctatctccatcaatgctatgtacaacactttaaacaatgcaatatatgtaagacaaacaataattctgaacacatcctcatggaaagaatgaaaattcctgatatattttcccatctctgttctgagccttgaagtcatgtttagagaaaaacatcccatctctttgccgtttgtaaatctcctaatcccttgagtgcatgtgaagtgaacgctttgttttggcaatgaattaaaaattcccttctttcatttcctcctccttccatattttccgtctcccactttgttctcctcctctgtcctttcttttgtggttgcagaggatctaactgtacgcaggcagccatgggaggagtgatgtatgctgaactcacactgtcactcttgctgtaaatcacacgctctcgcatcagactcttccccccgctccttgctttgagaatggtgacctcagttgatgtagattttcactgcaaaataatattttatacagtgatataaaataatagaggatgatttgtttgctgacacaccaggacagtgaaagcagagtcattcatcaaaattgtccaccacacaactgtaactgagatacatatccaccttttccctgatacattaggagaacaagagataaacattgagtttcaagacagggcagttcaggtgagttgactgaaatgtcctgttttaacccattcagaaaagtaaacctggtttcaaccagttgcttaattttctatttctctgttttcctatttccaccttacatgaaaggtgaacttggaggatgaagtcttcttgtgatttgtttctgtttttcagatcttctgtgtctgctcagctcattggaacaaccattgtattttgtaggtttgtttttgccttgagtcagaatcacaaataaagttaagcaagatcttaaaactatatattataattttgattttttattacatttgttctttgacagttttatacatgcatatagtgttggttgttcctcctaactcctcctttcttatgtcccttgtgtacctgctccctgtgcccttccttacatgtctcctgcccacatctactctctttgttttgctacccatggattttaatcagtttgtacggctacagtttggaaatatccattggagcctggtgtgctcacccagtgagtttgcaactaaagactttcttccaccatcagtagccaaaagtttagcagggaagagtagagtgactcatgggcctatcccaatgcatgactggccattgacaggttctgtagatagaatatctgtgtactgtatggatacatcacctgccagttataaaacctatggcaaggcatgggacatttccctgggaagatgtgacaagatggactcatggtacctgagcataggtaatcagccatgtggcagaatgaccatcagaataaatgggttttatttatcatattaagttatgatctagcgagagaggagcctagctctatggctaaggtattagtaaatatattttcagtctaagtcttatatctgtgagcatgggtctggggcgaagaaccagacataacttttataaggctctgccttatgtttgcaatgtctctgttgtgccttgaaggtagatagcattttgcagccttttttttttttttcttaaaattttacaggtcttgcattctttctacccgtttgcagtatttcctgtgtcttagaagtggtggtgtgtatgccctgtttagtgctgatctctcagcaaccatttattgcaagcacataacgagcagccacaagtctctgcattcaccactgctcactgtctgggcagatggtggcagatggcacagtgtgctctggaggccaacggtctcataacctttctgggcagggtatttttggggagggaaacatgtctaatgctaacctttgacagcagaaactaaagtataagaagaaaggttggagttgcaggaaaatagaaaacccaaagggatttggtatcctgcatttgctgcagtctttcttaaaaacaaggtcgctaagaattccattctggataaagcataggaaagccagaaagatatcagaaaggtagagttggacaatttgcttctgaataattattaggtttaaagtcagcaattgcatgatttatagtaagagattaacgattctgtgctatctttgagatttatagaaaagtaaattataacaagtctaattattacagtaagtgaatctgttagtcagtgtttattcttcactctgtgttccataagtcacctaggctggtagaaacatagcgatatgctgctgctgatctctgatctgatataaatagtggagttgtaacatatttataaagctaggaaacttagaataattctaagattcatgagatttttttggtatgaaactgaaaagggcatcagttataggtcgacatattaatacaccaatgctgtgttttggaggctgttggaagaagattttgaaatattgggcactataattatttcttttgcaaatgagtaacttagttaaggagaaagtctggggcttcctttggccttgggtagtctcattttcatgatggagtagggatgtttcagaattaagtgacagatgtcatgtctgatgagtattttgagaagcattaaattgcatctggagcactttttcagggcatatctgatcagatgctcgcagataccacctgcacatttccttagctacagacatctgtgggtggggaagagaaggagggaagggcaccagtagccttggtgcatggcatagaaggcaaacatctaggttcacatggtgggcttttccctctgaagcctgtaacttaaatttaacagtttttaaaaaacaaatccccatgtgagtgaaaatgtcaccggaagaagtttgggggttgtagtgataaagtgggtttttcaattctgatagcccacgatctgaggtgacatatggggagaagtgtgggtttaggtctctaatgactttttatctcacttcctttcctaagatgtgttctgggtcccaatgtccacagggccctcttcaaactctgtgattttagggattttgtttactcatttgttttgttttgttttctgagacaggggttctttgtgcagtcctggctgtcctggaactagctctgtagaccaggctggcctcaatctagatccccatgcctctgcctccctcgtgctggggctaaatgcctgtcccatcgctcactattgcctgatgatgtttaaggttttaaactttttttccttcatgtgtgcctttgtgtgtgtgtgtgcgcgcgcacgcgcacgtgtgtgcccctttccatgcagctgttggaatctttgattatgcaggtagagacagccgttgggaatccctttagttgagaaaagggggaggatccctgggctgtttgagttttctttaccaggtagtgctcctagggctggggacattagctaggcaactgacttgcaatagagcaaggacagcatcctgttagttcccacatagggaattaagacaaaaggtatttctaggtcactcacctactagataacaaactcccacttacaaaggtttctatgatgtggcaagacattgcccaactaataggtagagtggggctgtttcagcatgaatgctgtttatatcaattttaggtctacctgggttttatctgtacaggaagatttcacctgtactgttttcataggactgctgtaagaagttaacatgaaattggtggctctctgtgtgagagctatccaggaagaccgttgtaaatagaggtgtgtggccctaacctttaaggcctggggtgtggttggcagatcattattagagaaggaaaaaaatattctgatacaaatgagccattgtccatactttagaggaaataaaatccacatggagaaaagtgcattaagaaggtttcattttattttttaattttgcgggtttgaatattaatttatcacattaaaagaacagcaataaacaagtcccttcacaaagagaagaaaacaagtatgaacaaatactaaatgtttgacacttttcctcccaatatgccttcacttttcctttttggtggtagggaaaataggtgacatcatcccttctattcttagtgtctttgacacgaaatccactaatttcacaacacacgtgggaggccatacttttttttttttaaatgagccccatcttgtcagttagttataccacactttaaagaaacagtaataacgaaagtagtctgctgtaaccagaggattttaatattcacatatagctgctttccaaacctttcagggttaggatctatctacggtaaaaagccaagaccttcagagagccacttgcttccacctgtctccttcctcctatccaagtagctagggttagagaaacagggaatgatggtgtgttcttgttgttgttgttgacgatgatgatgtagttttaagcatggcttcctggaccttcattcttgtggcaattaatttaccaagtgatccatttcccttgttctgtttctagggtgctagggatggaatctaaagccatttatatgctaagtgagcattttgccaagaattacatttctggaccttcgtgtctttggggtgtgtgtgtgtgtgtgtgtgtttgtgtgtgtgtgtgatgtgctgcagcttcctagagaacatacggactggaaagaagggatgtgtttcagaatgtaggaccaagtcaagccaaggttgggtgttggcactttaagaaaggcttccttgtcctcggccaggtggtctggccgctgggctgctggcagaacactcctctttgcagagctgtgagcagtgtgccaggtggaaagagaagctgtgtcacagctggaaagtttgaaagatcctcattgcctcactccccatgcagtgacttaatggatttgctgctagtgtttacagagcaggaaggtactaagggcttcccccttagtggggaaaggttaagtggctccttaggaaagcacagagggaagggtggggcggaacccttgtgaatgtgaaatcctaggtaacaggatagagatctgttttagatggaaactaagatccttttacctccctcctttcatttttccttttatctttttctcccctcttcctatcctctctgccttcaaatttgtgctcctgatatgtattgggaaaccacgattatctaagtattgtttgtatctaatctatgtgtccaccataacatgaagaaaatgctaaattgtaccagtgaatcatcttctgtagtcaaagtttaaaacttttgttagattctttcctaaagagccaaaggagtaaggaatgaggatgggagctagagaaggggttacagaatctacttttaaaaagaacatttttaccaggggaactgaggctggagcatcctgtggcctcaggaatcaaggtcagtttgaccaacacagtggtattttgtctttcaaaaattgtgagacattggaagctttagtttactaaattcagcaaagtggaaacatctggttgaaaactgagggaaaaatcattcaagcttccaaattaacaaaaaacccctatcgctcattagtcatcaattataaaatcatataaaatgtatgactttctattttcctctccagaatagaactagacctatcttggaattgtttatatgctaaagtcactcctgttgtttgagcacctccatggactgatgatgtctgacatcatcagctagcaaaagctgaattgggctcatgcattctcgcccctgaagtgaaggggaaaccataaagtgcacgagaacatgatgatgtaggtcacagtggctaccctggtgagctagagcatatttttatgtcaccaaaaagcatgagaagaatgcacaaaggaaacaaaccaaccctgaaaacaaaggaccgaatgtgtgtcttttctctcactggagacagttcctttatgtaatcatccttgtgggcccctgtgtgggtgtaaagggacttcctgtgaagacctactgcatgagttggcaatttttacaatagttttaaaagattttatatgagaacaaagacattacaacgaataagtatgacagttattaaatctttagcaatctattcaccaagatgagcttattgcagtacaaagtgaaaggacaaaaagttaaaagaagggtgggtgcttgccagaaagaaagaaaaaagaaatcacacctcaatacccaaagcatctgaaattctctcttttatttctgactttctaatttgtccgtttccaggggtctcagggatcttctgcaataaactttgatcagagaatctgaaagttcacaaatgttagaaatagaaaataccatgttctgttcttccccctcagagagtgtctcatgtggtgtgtgtgtgatatgcatgcatgtaccttcagagaccaaaaggggactctgaatatcctggagctggaattttaggcatcatttttgtgagtcatttggcatggatccttaaaatggaactctatttctgtggaagagcagcaagtgctctttatccattgagctgcctctccaaccccatatatagctttcagaaggccatgctacacaacctgcatcagaaagtctctctgacaggcagtgctatgtcttgtctctttagcttttcttttcttggtgagcatatcatggtacatacataactaaggaatctgcttttcacctaatcactaagtttggagtgtgtcaaggtgtacatgtttgggaattcttggtgttttaatgtatatacacatctcagagattgtgtgttgttccttaatggatgcacgttacctctgtttggtaaggtttactaccagactggggttgatagctggccttatctttatatatcatgtcatggcatcaccaaatgggctctgaaataccagggagatttctaatgtggcattcaatgctcttaaaataaaggtaagctgaaactgcagtttctcttagagttaagagccagtgttggtagaatgttgtttctgccacatagttcatcatagtgcttgcaagatagaacacacgcatgagcaggggattagatctcacttttgcaatggaggaatatttttaaaatgatggcctgctagttagaagaaaaatcagtcctgaccctgactgagtagataccagctatttaagaacatgcaatccaagatgatctcacctcaaggctgtcatcttctacgtgtggatgggctatcctcctttttttttgccacaaggagataaaaattattagcttgctaaaggtgcacttgttaaagttaacttattgaagaaagcagacactgaagtgatgctaagcatcccaaagcatgtcttctgtccatgtctctcaaagaagatggactatgtcagtgttttctccaatagaaataagtttagaagactttcttgacttgtgactgttatcttacatgggcatggtattcaactgtcctccaaatgcttaggtttatactcatagatcagtgctgttctaagtctaagtttctttttgcagcaggcaacagctagtttagagatctacaactagtcacactccagagagtaaatagtcagagagtgcttgttcctcaaccagatctctctattctacccatgatgaggctcaaggaccactgtggaaggagatgggaggacatatttaagagccagagtttggcatggagtgctaagaagatttcctatgggacaataacatgactctgatgctgagcctgatgacctagatttctttctacgatccatatggccagtaggggagaaccagttcctgtaagttgttttctgatctctacatatagtgaacgtgttcacatgtatgcacaaccctacacagtaacacctctccttatatgcacacacagaaaataaagcataaagcagctttaaaaataatatcttctggacacaacacagtgtttgcacgtgtgaactcactgcagtagtgttacccacctaagacctacacaagactggaacctcactttcctctagtacctgttggaggctcctgaggcttcacccctcactgaaggactacagccagttaataggtttggggggaaagagttcattttctgtgtcagtatatccactggtaagttgtctatattccagttaatgaccctccactcatacccattcaagcaactataactaaatccattggataagaaagaaatgtcatcaaagtaggaggggccttgttggaaagaaaaaaggtttcaggagacaaagcaagagataagagaaagagaagataagatgggatggataagaaatacataagaaggtgtgaaaatgccccccaagttcagtgtgtacatatacaaaattggtgaagaataaaaaataatcttggtttgtatcacacaaaatttgagagaaaatattggtgcttataatatacaaagagaacgtgtatcttacatgcatgctgtaatgtttaaatatatcaaatgtgaagggaaattcacattgttgctaaagctggagatgtagctttagtggcagatgttaggccttgggttcaatccgtcacagaacaaaattcaatacccttctcaggtttctctatcacatcagtatccttgtttgctagcaaggtcaggaagataatgcctgtatttgactttgccaaatggagaattctggacccttcctatgctttggatctactttggtgacgggtttcattctccataggtctcagccatgacttaccacagttgacacttctttcctgtgtcacattgggtatgtctctccccagagctgatgactggtggtcaaagctgctctaagcagaggtcatactgctgtggctaacaccagcagttaaacacactgccgctgcctgcgagaggcccttgcacttccttgttctttaaaaagtcacattatgttgtgggactagcttgtaaaatttttgtgggcaatcagaaacccttgaagttttcacacagagaaaggaaaaggtttgccccgtgagaaagccagggctgggtatttttgtccttttctttctagtgcaagccgtctgagggaagattcttcatggcaaaacagttcatcaaaactgagaccagggctgaagaatggtctgtgcttcctgtatttactgttcgcagtgatgtatgtgtgcgttttaggaactttgaacgtctagttgagtctgtactttttgtggcttgtctgggctcaaattcacaacctcatgaagagttattttattggctaaaaatgaactctgccccttcactatcagatactacaaatggagatagcacaagcctttgaaaacgctttataatgtagttgaaagggaaaccactccattcaacttgttcagagatctgaaaaaaaacatgaacagtgaggtttgataggaggccacattggcgtttgatgtgaaatggctttctgagaagcatttccccctcacaacaggactaattattgttgggtcccttcttgacacttactttttttttttttttcctggtaatcaagtttccttttccttaaaacacaagctagagctccgtgattggtcgactctccccacaaactcaccgctatgattgtcctccagttaggagattttggaaatccccctgacatcctttttttcttttttaccaaatatgtctctagttgtgtggctatgaaattttatcccaagggctgcctggctctttctgactttagtacacaccgaagttcatcgtttgtcttaatagcacagtccagaattcataaagcagttcctagtgggacagtggccacaggtcctctcaaataagattgcttaacattcttttaatgtgagaagaaagctctggagagttaccatttcttctctggcctgtgggtggtgttcaggtgaatcagaagtgtgccagcattgccagggagttcgacctaacttttctctgtccctctggggcctttaagatgataacatcgagttatcggcctgcttaaagaggtagctattactccgaattcctttgaagtgttgaagaaagagacgacactgctcttcactgcctttggctccttcacacggtgtctactttctgctaccttggtactaaagttaggcctactccttcagaagactgttgcagtcttccagtgaccaagaaatcttgatgaagctatatggtgtacccattgaggaggacatttgtaacttatccagggacttctggaagtacaagcataagagttaaaggttgatttttctcccactgtacatacctgtcctatgcatgcacgacgtcttctaaactatacttttggtaagctactctggtttgggtcttaacttggagttcttcaagatgtgacaaagtttttctacctttcctcccttcctccctcctgcctccttctttcccttcctgtgttccttcctgtttttctacctcaagtgctttaccttaatcagacatctgccccacacgatggttcatgataaacatgggttaaaaacatagacatataccaaccttcttttataaaaaactttctattaattctttgtgaatttcccatcatgcaattcaatcccactcatctcctcatcctatccatacatatctgcctccttcccttgcaacctctccatcccaaattaaattaaattaaattgaaaagatagaataaaaacattgtcatggaagctgtagtgtgtcacacagtgtgcccttttgttcacacttctttgcttgcaagtgtttgctgcaatcactcattggtctagtatgaggcctctggcttttgctacattatcaatactggaaccttactggacacctcctggttatcctgttgttgccctgtgtcatggagatcctgcagctttggatctgcaggacagcccttttatgtgctccagcagatcatagaggagttagatgtagagtgggccaactctaagccttggatttgggcctgagaggtaatggagctggtcagcccaccagttcttctgtgctcctaccaccagggcaagctctctggcacatctctgggtagctcagccaatgttgcagctggaatgaagtcagctcacttactgtcctgtcctcagggctggctcacccttgccttcctcacttgggccagctctactgtgctgcccaggtgaggtgcagggcctgctctagcgctcccactctaatgacctctaagccaactctcccatggccagcttacctgcctgtggcaggtggggaggggtgtgtgtatatgtgttgggggaaggaatctctccttctctcatgccaccctacagcagactaggagaggggctagctctcttgagttcatgccctcggggttagctctactatgctgttcaggtgagggaaaggggccagttttccagagtgtggaggcaatcaaggggtggggggtggggtgcagctctgcacagtgcctcaagcaggagtccaaaccaggggcatctgcatggcctttggtggtaacacagacctgaaaatccaacatagaccctggctgccacaggatcatgaacccagacatgcccctcacccccaagagcatactgggcctggatgtccccatgccctcaggtggcagtaaaagccactcagatcagcatattccaccctcagcaggacaaccctcagatatcctccacacagtttctggtgcaggtcagactgctgacatcctcgtggcctttggtggtaacttgggacacagacatcaacacaaaccacagctgcatcaggaggaccacagacccagatgtggtccttggcagaatcccagggtcatgacctcaccatggcctcctcatatctgttcctcactgccatcgagtctccagctccacatttctccacagtgtacaataatccccttggctttgttttctctcccatctttcccttctctccatcatgattttgtccatcttagtgggacccactaagatcggtatctttcttctagccgccatgggcctgtgtgaccaggatgggtgcttgggtatctttcttctgacaacaccataggttggctaacctggggcaagtttttctgggcatagcctgggtggatgcttgagtcaattccaaccttcctacgtctagcctcctagatcctttctgtagcataagaaatcacaacattttggcctcagaaacttgatgtccaaattagtcctggtggcaaagattggtaatctctctgaagatggtgaggcaggaggaatttagtagattctgtattaaaatttaaaaggttaaaaaaaagatctgggtatatggcctgtggaaaaccacccattttatgatgtagtccataaagaattctttgttctaagaaggaattgtaccaaaccctctcaattccattcaaatagaaaaacgacgtttttcatactttacaatgtctgttgagcatcctttgtgcatgcatgttttcagtcctcactgacgggccttctgtatttgctttttctctaagacacagagttgtggagatcagtggcctctgtgcctgttcttagactccccaccttctagttgcttctagtggcttctgacccaacagaattaacattaatattagtttctggcatcagtgttttccccctgtactatcttaggttgcatagttctgtataagtcattaagtcaagtgttcattggcgacttgaaatggcaagctctaaaacttgttgcctctgattgataaaacagtcttgatggctttaagcacactgagtaagctgtctccaaaatctttgtagaagctttgtagaaatgcttctcaggtgttccccagtcccaggcctctgaaatactaagttcttgatatgaactttctcttggggacactagaacatgtggattataaacttaagttaaaattttcatgtacactgaggaatttacatttctatcttcgtactagtgtacttaaagaaatcctgaagctgtttctatgtttagacttgggcattaggttgttttttgttttttgttttttgtttttgttttctctggcatggtagaagtatattctcttctcctcaaatggatgctcctctggtcatatgatttccaacactatgggattcatacctgctttaattaggttgaaagtttgaccattgcccactttcaaacaccttgaggtattttcttttctttaaagtttctaaaccaggatttccttctactaaaaatcctctttcccaattctttaaccatttctataccagacaccataaaacctctacatatctctgtaagagagagtgtgaaagtaaaacctccaacagctttataacgcagggacaaggcaaaaatgtgagctgctttctctggttctattgctcactgatctacggaagtattctcctgtgtctagccattcctcagtccccaagcttgcaacagaattttcattgaggctttcccagctgctgaaatgctatagaatttgattttaggtttcagatgctttggcatctctaagaaagtatattaagtaacgaattattgtcagaaaaatactattgtcagttcttaaaatatgaattattctcatcagatcctaaactaaattgctctcttaaaaatcaaaatgaaacaaaaccaaagaaacaacctgtcttattaaagaaagtcacagctgtgggatctggtctgttcttttgtaaacaatgatcttttaccattttcttaactattcttttctccagaataagaaccctgggctataaatgtgtaatcatgcacattataaatgcaaaccacatacctataccctcaataacataagttgaaaaggcacataaatttttcatcaccttcattaaagatggtgaagtgtctactgagcatattattataagcagtcagatttggtagagaatcaaagaattatataaatataagaactcagtggtcttcaatttgggctttgtagctagaaacactatatttaacgaggtaaataggtgtacaaataatgccttgagaacatcaagtatcaggaagagacttttcatgctctggcattcacagtatacctgtggaggtgggtgtcatggtagaggtgaagtcatgaagtcatggtagagaaaaggtaatcagagcttctctgccttacagtgattttaggatatagcaatggtggtagaaaatactgagcgatgggggaagaaagaaggtgggtggatgatagatgaatgactgagaccacctctttcctgagaagcaagagagagaagatggacaatatagatggaggaaacgcagctgaaaaaactaagagctctgcccttggtcatgacttttgtaacccaggcaactcacttgctgctttgaatattaattttatttttacattcataaaacaagggttgttttactcttcaaaacagaggcagctaagatgaaagtttatcgggaaaagatgagccaaatagtttagtgtatgaggctgaaaggctatggagtgcttctaactctgaaataaaactatcaaaatgccattatctttggactatgttagtttgaatcatgattagaaggaagctttagtcaaaagctgtaattgtagaagaaaggcagtgaagtggaatccagagaactgggtaagataaacagcagcaggggcagagggaaatagatgaagactatcaatgcagcaagagaacatgaagtgtcaatttatgcttagataacttctgagtattcttatggtttagtgagtgccaaaaactacagcttatgagctatacaatatcatttgataatatcaataatgcttttatggtatcctttgaggttgcacaagaatttgtatatgctaagtatcagtgataatggtccttgaaagctctgtaaaatcattctctatttcctcctgggaaaattagaatccaatggtagagtcttgaagaaaatagacagtagtggttactgcagtagtacagtgaaataggaaagactcatgacggttgacagtcttagagggtgaggagacatttgaaaacacacctggaggaaatgtggtgtggaaggaatcttgttttgtttttgtttttgttttttgttttgttttgttttgtttttttgagacagggtttctctccatagccctggctgtcctggaactcactctgtagaccaggctggcctcaaactcagaaatctgcctgcctctgcctcctgagtcctgggattaaaggcatgtgccaccactgcctggccaaggtgtggaaggaatcttgccagagagacatgtatgtgttatggctgtaagtcagtgagaacctcaaaacagcacagtacattcagggctctcagttctgttctcatattatagggaagtgcactcatgatcttgaccataggaatgccatagctacattaacaattctcacctttaggacacataaaagaatctactccattcctcatacctactctctttaaggcatacatatttttaaattgagtatgtttttattccattataaatgctatttatcaaggccaggaatatatataactttcccggaaactgtctttaagaactcaaaaatttggaatctcaagaagggatacaaatgtgaagcaaagtcatgttccctatggagaagggcatattaatgaatacatacaccattgacataagaccctctgcctggaaaaagcagttctggtttagtttgagttgatgctttatgtcctccccgtggatgacttcagaccatgtttgtagatggtcctctgtgatgctaataacttccttcttttttcttctggattgttaacatagataccagagtgttggctatctctgtaaagataactgaagaggaaacttaagagatttttaaaaagtcatttggatggtgttctgctggggcagataagtgaaggaatgtttagctgaagtggacacaggtgaaagactaaggcagacttatgaaggaacatttagccgaggcagacacaggatattctgccaaagccaccttgaaaaaggacacatgatgaaggattctttgctaacaacatgcatgtgttggtctgccttacgctgcatagatgctgcatttgttgggactccatagagagaaacaccccaaaaaaaaaaaaaaaaaaaaaaaacaaaacaaaacccttctggtggtgtgctgcagtttcttgccacttccacagactcaggctgattggatgcatgtgttgaaggttgaaggaagagccatggaagacacatgatgtatagagagtataaataggacttaatggatagtgaaggaggctgaagttggcttacttatagagctagctatgcaaaccttgtgggtctcgagtctttgctgatctttgcttccctgagaaaagtacaacctagaacacctggccttcaacctggtccctcctgctgactcgagttgaagctgaggcctggctgtctctgctaggttgtgtcagtgctgctgattcctgattgctattccaactctactgaactggattgctggtgcatccatgaagagtttgcgattgaaatgagctggtaccgctgctggcctgtgaacggaactgccaatttccagacactacagatggtagttactccaaagaacctttctaaacaggtgcacttccccatatccttttttttcctactacctttggtgggtggtgtgctacaaagggggttaaaatgtttaagaactattgttaaaaacagattttgaaaaaactaaagttacagataagatgaaaagtaagtataatgcctaggaggaataaaagttagtgaatatcccacttcttctgttcatatagctgacaaagatgtctgataagttgcgagatgattaagtaaatttcagtttaatcattctatgaaacaatatgaatttttaataaaagcatgagattacgttacaactagtgatagagaattttataatgcaagagggagagaatagcagattaaaactcatgcatattatattccatatctactgattttcctttgcttcctggaacatgtatactgaaaacatacaaactgttaatgtttaggaaggaaatggaccagaaaacagtttttaagggacttggctctatattcctgttgttgttgttgttttatactggcaaattacttttaaagtaacaatatactgggaaatgagtatctgaagcattcatcactattttcattttttcccaattaagttcaattctcaatattggcatcttgggagtatattgtgatttttagcttcataatctgttctacctgccatgcaccagtgtaaaagtgtgttgtggccaaatgttagcaactaagttatctaaagcataattaaccagagatttcatgtgggcgccagtttgtaaaaatgcatgcttgactttttttttttttttttttttagatgagaatgaccatatggacagaaaatatatttcaaatgtttatcagttttcctaaagccacaattacaagggcaaacaggaaattaaaataagccctatatgtttacttgaacctctcatattttaaaaatgtattcgctcaggaaattaaatgatattgaaagaaaattatttgtaatctctcaagtgtttgagagagaatatggcattggcttagaagacattgaaagagatgctactggcaggaggattgaacagattttcaaataatgcagagaaaaacttataaccaggaagagccagcccattattgcttatgccctttgtcttctgttttgttttgaatgtgagtggactggagaggtttctatcatttactcacagtgactctaacaacacggtgagaaagatgaacacttggaaagaaactgggatctgccttagctgcgtgatgatgagcgaagtgagccaagcttcacctctctgagaacgaatgctggccatattaactatggtttgctcctaggaaatgttcatttgtatagacctctctctctctctctctctctctctctctctttctctctctctctctctctctctccacacacacacacacacacacacacacacacataagtagtttccagcatccttagagctaaaatgggaaagtcagttgaggtgtgaagaagaaacatgatggattcatacagcatcaagtgctccttcagccttgggcaagggaggtctgaagagaagaacaaccattgctaaacatagttttgcaatgctgtccaaagataattgagaaggaaccagtgagtgatgttttaaattatatgttctaaatatctatcattctcattaaaataatttgtcttgtatctttaggccactttggtctagagttctaatctgaacagattaatcttgttaattaaaaaagccatcatgaggtcaagaatgatgtttctattttttttattactgttttgcttgtacttgaattatccttagcattgtaatctaaagatttaattttacacactaaatatattatctcctctgtggattcatgactagtttattgccaggtgctggtctttgtagtggaaggccaaattaatcattactagtggggtcctctgtgtcaggaagtattcaccactcttggaactatattcaggataattttcctcacttgttgctcctctttacccttatcctggcagcactcggtcgtgtcctaagacttcactttcttccagtttcctgttgggtgatgtaggagttgagatttcaattatggactctttcatatagacaactaatgaatatctggaatgataaatgtctgagagctgaagatggtgaagacatcacacttgtagatataaatgttactggtttaggggatgggatatgtgtggagagtttcacaagaccatttggcaaatatcaataaatactatgccaaattcagtatctgaatacatttaagaaggaaattaggaaggatgacaatgaacttgatcaatgttgtataaagtgcactctgttttcagtgcatttaatagccacttgtagcacatccatcacagttaagcggacagtgacctgcttttggccaagttgatttaatacttatctgtggtagccatttctaaagccacacaaaatccctgtagtggtttcttatgaacttcccactattacagatgtggaaattgaggatagtaacgctatttctgttatgatcactcacagcaccattgtgtccgaatctatccaagagtttgttttctaagtagtcaccctaaaagagaaaattttatttttgtagctaaataaggtcagcttcattgctcattatttctttacttttctaaagctaggcagatagtaatatccactagtttgcttcttagaggctgaaatgactttttatttttcatattatttgacactttgatacatcctattaaatcagtttcatctgtctgtgttgtccttgctggatattatctgttgggtaagaaatagggtgaaaatatatgtgccttatttctgcattactctcacagctgggtagcagagacttgcctgtgctgatgtaagtggatgtatccatgtacatcagactcagactccactcattcactcatcccacctccttaccattggtgctagccaggttcttgcttttctgcacttgtgcattttctggttatctaggatggaactactgcttgtgtcttcttgtcaacccctgagacttagattgagtctttagaataacatttacacattcagtttattcgttcttctaaatcatccctatataattggacatttagccttagtctagccttgagggatttatggtatataactcagataaacatgagtgcttttattttcattcttgcatccacctgttgtttataaaacaatgtttgttgaggcattcttttctccattttaagctgggtaatatataaaaataccactggtctttgaattcctgttgtttcaaagtctacttggcagacactcaataaatacttgttggataaataagtaaacaagctcaggatgggtaaagagtttagattctagaggttgagatattcagaaccacccaccaatcagatatccccattgttctgagtttcgctctattatgaaggtctactatggcgctacatcccttttactgttttatggcgttgatttgcatgggcttgtactgcgtatagtagagcctgtgtggtttggcaaataggagagattttaatttgctttgagttattcaaacatgtttccataacaactgtgttatttgcttccttggtttatttttagtaattttttttgaggcttaatcacagaccagactgttacatgttgcattcttgactatgtattcacccctacccacgccccccccccttttttttcttttcgtccgcctgtcatctggtcatttgcttgtgcaggtagatgggccaaatttataattacctacagatgaatatttagaccaatttttagaatgtgtctatgagctgttactattgatactaaaataattccttggcttttattgtttgtgagacctttgagcattattcagggaaaacctaaaccaaaatagctgaatgagtttgttgatgaatatcaacccaaatgtacaactgagagcgacagcacaggagcttcaaaattagtacagtacagctaaagaagcttcatcagtggcttgactgagttaatgttccaggactagaatcttctatgttgtatatgaaggaaattaatgttctattcgtgtataagcaggctttgcctaatctttactctggagcaaaccactatttgtgagttaaaaatactgtgaacatgttttatttgaggctactaagatagataggagtccagcacatccctgacctcacctgacctcaactgtcgtctacattatgctaactctgccagggtgaaaagtttgggactttttacaatagttttcatgccagatggtgtggaaggaatgttggctcggtagactagaaacccagattttggttctactgtttgctaacaagctatgtgactttctgaaaacatcttaaccttagaccttcatttccttacctgttaagataaagtaaagtaggggagaaggggattcagtggcagggaacagagaccaaggtagctgctgttgtacttgttaggggaaccatgtgaacaccaagatacgtatttgctgcaagtgtgtaggaggactaggtccaacttctgcatgcttcctagttggtggcccaggctttgtgagtctcgatggtcccaggctagttgactctgcgtcttcttgtgatatccttgacctcttgtggggtggtacccagggaggggttccctttctccgaagggaagaggaggggtcaatggaggtaggaatttataagggtgggactggaaagagagagggtggactgtgatcaagacataaagtgcaatgctaacatactatgagttaaactttttttttgtttgtttgtttttttttctcctgggtttggaaagagattattttcttgtgtagtaaaaacaatgtaacaactcttggtgtaggaaagctgaacctgtagctcgttatggactttaacctgtagctactgactggcttcaacctatagctagcgatcagctttaacacaaccagaaaacaatgaccaataactgctagaggcatataggacaatgtttcaaacagtgatgtaactccctggaatttgagaatgaacagtaaagaggggcctgggtgttgtgcagtattcagggactgtttaatgccatcacaaccctgtgaggtagatctcacttgtgagaaaacagacctttagaaaattcactaactcaataaagaccatgaatgcagtaatcctccaaaccagggatcatttcaatgtccaacagccagcctctaaaactccagtgttcctgagaaactcactttccattcatttagctagtgtttgttgtatgcacaccagggttcagacattgctctagactaggtatctagcttagccagagaatgaacctcgatcatggagcttgcttgccaactagcagaggtattattggtaggcagactaaacaagtaggtatgttgtatgtttgtagggggtaagtgaaatggaaatttctagtttatttggagactcagttgtgtaatatgatgtgttttttcctctggaaactgtcttatgagaggatgttttgttgagaacagacatgtagtatttttctggaagatacctggaaaaggggcatgcgatgttttgctagaacagactcttgagagaacatgtgatgtttggaaacagtttaagtataacccaatagacagtggatgagactgtggctttggttctccttgccactctttgttgggctttgctgacattggattttgctgaagatactgtgacattggttcaccttctgttcttgcccgatcatcacttgctatcactttgtagagagaaacacaccaaagaacttcttgtgatattctgatagcttcttgccttgaggtttatcctggaatgaactgctgtttttgattcgtgaatgggatttgccagtggaccaaactacccctcctgagtcatgtgaactgaattcctgatatcctaacaatgaagattggaaatgccccaaagatctaactctaaacaggcccatatccccttttgccctattaatttttcctttccactacctctggtgggttagaagggaggttaaagtatttaagaacccttattaaagcgagtttcagaaaaatctaagcctacaggcaagtgtaataggaaaagtaaaaataaaatcagatgttaggattatagaggtgtattgatggtaagatgaatatgcaacttgcaactgtcaggctgaagtgggcaccatttgaattctaagttttggtaaaggatctaaggagatgaaggaattagttatatgggcatctataggaagaacatccatgataaagagatgagcaggtcatgaagaatatggctgtttgtcatggtttgtatattcttggatgagggtgtggcaccatttggaggtgtggccttgttggaataggtgtgacctggttgtagtaggtgtgtcactgtgggtgtgggcttaagaccctcaccctagttgcctggaagtctgtcttccactagcagcctttggatgaagacatagaactctcagctcctcctgcaccatgcctgcctggatgcgtccatgctcccaccttgatggtaatggactgaacctctgaatctgtaagccagccccaattaaatgttgttttttataagacttgccttggtcatggtgtctgttcaaagcagtaaaaccctgactaagacaaattggtaccagcatagtggggtattcctgtgacaacctgaccatgttttggggaggactgtggaaggagtttggaactttgggccagaagatccatttggtgttaagagctctttgggatgttgtgtaggagctgggaagataatgttgagaacagtgcagaagatggaggtctggcttgtgaaatttcagagggaagattaaagactcttatcagggccattgctattttgattgtgaagattctgtggttctggttagctggggctgaagagtcagctgtgattgacaagataccagaactactaaagtgaaacgtttgcattactgggactattgatgctggttagctggagctaaaaaattagctgtgattaagaagagaacagcatcattgaggtgacatcttctgggaagtgttttctgaaatcacaaagaagctgtgttccagagatagccaaagttgtaccttgtgctgcagcaggacttggtaatgtaaaagagtcacccaggtggtactggttttgaaagcatgaaggggtcatgcagagcagctgaggctcagcactgtgagaggccatggaaggccgttagtgaaggtgcagcctccattgcaattgatggcccaggactgaaggggtcatgcagtgttttggagatgccaggaccatgaatgaccaccaagaacagcagcagcagtggagtacaggcagttggacctagaagacaaattgtgtcctacaaagagcatggctggagaagtgacccaaacccttggaggagcccagaagattgtgaattggatcccagacattgtatagttggagtttaaattttgcttttgattgtgattgtgccctgatatattttccctcttgaagaaagaagatattttgttggagtccacagttaagagactttgagtttttaaaagactttgaattttaaaagatattgtatcttttaaagggattgaacttttaatatgtaaagactgtggaatttttaaagttatttagatcttggggatgaataagaactaagggttgaggtgtgtcaagttgataaggggtcagttgtactggctagttttgtgtcaacttgacacaggctgaagttatcacagagaaaggagcttcagttggggaagtgcctccacgagatccagctgtaaggcattttctcaattagtgatcaagtggggaggtccccttgtgggtggtgccatctctgggctggtagtcttggttctataagagagcagtctgagcaagccaggggaagcatgccagtaaagaacatccgtccatggcctctgcatcagctcctgctttctgacctgcttgagttccagtcctgacttttttttgataatgaacagcaatgtggaagtgtaagctggataaaccctttcctccccagcttgcttcttggtcatgatgtttgtgcagaaatagaaaccctgactaagacactgtcgttttgcaattcagttgttcatgacagagaagtcaatataaagggggctaaattcacacactaacatccttctccatagtttgttgagttttcagaagtagactgattttttttatctcttcatgatgttccatcctcttttcccagaaagacaactgggaatgctcttcttcttgtttttttgtttgtttgtttgtttttttttgtttgttttgttttgacttgctctgatactgagctctcagatttgctgatcttgacagttacttctctccccactatggtcctcataaagcttcaaacaaagggattgatcaattttatatagccaaatcccatggggaagcttgtgactcagactcaagtttgtgatctttggcttgtggcctaggattctgcatttcatacaagtttccagatgatatgctgctgttggcccatgttcactgtgcatctaggatgaatttgtgtactatgatgatgatgtgagcctgtagttctattttgcatgtgtgtgaggtgtgcacagattagggcagaattggctatacatgtggaagctagagaacaatgtccttactcaggtgctgcccaccagttattttgagacaagttctttcattgacatggcactgttcaactaaggtaggactgctggtctgagagccctggtgatcttcttatctatcaacctagtgcagagatcgcaagggggtccacatgtggtgctagggatcaaactagtctccatgcttataaagcaagcacttgcctgcctgggatatgtgttccccctggcttccagcactggctctgtagtttagacagtgcatctctttcccacagttccaaggtaggtaaaaataactcatcaaatgaaaaaaaaaaaaaaaaaaaaaaaagaaaaaagaaaagaaaagaaaaagaaaaaataaaaaggaaagacaaccttaccctcaaggaagcgccatgctaaaatcactttctaattatcagaaagtataattcaagcctattatattttttaaaaattgctttttatgtgtatgggcatttttagtgcatgtatgtaagtgcatgtatgtatgtatgtatgcatgctttatgctcattcaggtgagaaaagggtgttaggtatcctgaaactagagttacagactgttgtaaactactgtgtgagtgctgaggagggaacccacgtcctctgcaggaagagcaatcgatcttgaacactgagcattcttgctcaccatacaattgaaaatccctatcatggtccccaggcattcggtgctctacttcctgaccttcactttaatcactgcccatcatataccatgttgtagccatagcagcatcatttctgtttcagaaagctgcctgaatctttaactgatgtggggatggcttgtgaaataaacttgatgatgatttgctcagggcacagcaataatatgaactccaaaacagaactttgaaaataatattcatgaaggtgataaagctttgaaaaaataaaagtgctttggatttaaagaaagactcaaggagcaaatatttattatatatctactatttatcaggcatcattttcagacatttgagaaatttcagcaaacaaagcaaagagcacacaacacaagtttggtgatcttgttaaaatgaggaatctgctgtggctgggccaatcaatccagtggaacaggagaaaagtgggcaatcatataagaaagaacatgacatttgagcaaaaccaggggacagggacatctattcagaaaatttcaaggaatgagtcttatcacaaatgcctgaaatgctgttcagaccagtttgagtacagcaaaattagtaggtgtgtgtgtgtgtgtgtgtgtgtgtgtgtgagagagagagagagagagagagagagagagagagagagagagagagagagagcgagcatacctgtgtctggttataaaaagtcattttaccatctgtaaaagcttattttgaagtgatctaaattggatattaaaaggaattaaatagtcaaacaggttctacaaaattgactcaatatctgaaagtttctgtttccacctgcagtataggcaggaaagatttgacctctctaaccacttctttatatgctctgtcccagtgaaagagctacttctgcctcagttaaatttagaaagtcactttgacagagccctagattttggctaaacagtttattggtaggggacaatcttctttcaggcagggggtggcagtcaggtctgtagggtgccctcctgctggagaggagggatttgcagtattctgttgaatggtaggaaatgtccccaaagattccagatgaatagcttcagcatcagctggagctgtgtttgaaatgttcattctcaggtcagcatgaggatgagtgatgctgacagtgtagggcttatatgaatgagtagttccattttttttttttttttttttttttttttgccctgctagaagagctgtcttcacactgttggcccattacaaattcaggaggaaccaaaccaaattaagatgaacaaccagtgcatggcctccgtgccagagacttagttgatctggagatgggtcaatgaagtcagtactttccattctgtctaggtgaatctagaaggtagaaccagtgtaacagggaagatttgctaaccttgacactttggagtgagtggctttgttgagaggggctttcctgatctttacagaaagtttatagtatccctaatttctgtttactagatgcctaaaggacgctttcccacattgggcaaaccaaaaattaccaaagattaccagatgtctattcaggaccaaaatgccccagttgggaaccactgttctatggtcatgtttctcaaaatttagtgcaatactgcccaggagaaatttaatactaaccacatgtacaattgaaattgttttcagcagtcatttttaaataaacaaatacaaacagataaaaccaatcttaataatgtagttaacttaacccaatactatctgagctagattttaatattcacttactataaagtcattagtaagctatgaatctatattgtgtttctcaagttcttgaggtcttaatgtgtaatcaacactgcatccctcaagtgggattagctacagatagtatgctcagtggtctgtgtggctaaaagctgctgtatcagacagacatgttttagtaggcgtcagaatgagctgctgtgttccttaacatacagattgctctcatgcttccctcttcttccaagcttctgcttcactggcaatgcgaattccaaacagatgtccagtagtaatggagatgtactgactatactttgaaaactagagtagagaaaccctaacgtgttaattagacatgagttgtatttgtttgtttgtttatttgtttgttagggtttttgttcatttattttggccagtgacagtgacttggagcccagaagactctgataatcctagctccttccctaggccaactctagctgcttacaggagtgtaattcacattcttaggggaccaccaagagctctgactggtgacaggacacatccttgagcaggaccttccctgtttgcttagggcctgttttcctgttagcatatctctcagttcccttttcctactttttctatgaggttcaacactttaggatatcttttcttttccttatctgcttcttattatctagaagcctagtacagtgctttcacacataagtacttaggtatttacagaattaatgatactgtaaaaggagcaaagggaagaaatgatagtaaggtatttagtcaatttggggatcaactnnnnnnnnnnnnnnnnnnnnnnnnnnnnnnnnnnnnnnnnnnnnnctttctctcagtctgcttgtctgactcttcctccttctttcccttagtgggactggaaatgatcttcctgtttgtgatgtcaccagcacctgtgacatgtacctgggatggccctcccccaggactgttagtgccaggaaagtgctgggtgctcaggctgaaccttttcaccaagccagtggcattccaaagccatcacgtggagattgactcagtcctaaatcagggagctccatcacagggtggaaacttgcttccgaagggagtgactgatgttataaatcctggctaaagtacattttttattttcatcatatataaaaatagcctgggcacttgttctcagtatttttttttttttttttacttttaacaatggaaagcaatctttccaaatttcttttggaaaaagcctccacctcccagactgtcagtgctgagatttaatgttaaccaagtgtgaattaaccattagatttacgatcgctgtctgtatacctatgttcacagacagcatgagtgtagatacatggcaaggtgtgatttggtggtctctctcagaggcaggtggccgtaagaagaaagctagaagtgagttgagcttcacattatgagacattgttcgctatccgtttgctcatgggactctttttcctttggaaacacaaaaagcaaaataaataaataaatagatagataaataaataaatatcaaatagcgtaagatggaattttccactttgttttataggagtgtgcaaattttaagattattcccccctctttatctaaaggagtggctttaggaattgatgtaaaaacattctcatctcaaataagatagtttattctggaaccaaatatgtgtgaccatgtcctgggaacacaggcttagattaccctaaattatgtttcaatatacaaatagcttcctgaaggtttacagtaacaaaacaaaaatcgtaaaatcaagacctttttcaactccatggatgggaacatgagagaggcagataaaagtgcccagagtgaggtctcagccacaggcctcaggtgcttcctcagagcaacagccgtagcctcttgattggtgtggagtatggttctgttaagataatgtatccccaaaagcatttagctccttgtcacaggatattagatctggtacacagacagctctttagggagccaagcataggcaaggtaagttgtaattaggctctgtacctacaacattcaaacgtccgcacatcactcaagttaaaagcagccaattagcctctgccaacacagtttctctctagcaattttccttgagagtaagctaatataaatccctaagcacacttgaggtttgtctatgcttttgatgaaaatgactgcttaatcaataaaacctatcaggacggaggtttggaatgttgtgacagcatttgttaatatgctctgactcactcaataaatatggcaggcttgggagccaggcattactctgaatattctcaaagaacagtgaaaatatagtttgcttatgaaacttcaggtaaaagttgcctggagggatcttttgcactcagaagacaaaccactatgcttttattacatttggtctggaaaccatgctttaagacatgcatacagggaaacgcttttcttctgtttccttaggtaactgtagaatgacgctaaagagcctttcttttccctattttggtatttagtgttgagcagtgatggggcagctctaatgatgggtactgtacaacaagcaaggatgttgtttctgcagcagagatttaaaaaacaaactaaaggaacagtgttcaccacaagtaggatggttgacatattagttacaaggagaacacaggggaaatagatctacattgaaacaaaggctaaaatttcaaataatgttagtgcttagcagaaaaaaaatatggtaaaggaaatactttgaaattgtgctctctctgtgcattacctcattcatctctatggtaatctgaacgcacagtggccaggcgttcttcccattgagcaatgaggaagtggcgcacgaggcacttggttatataactgacttagagatgaagacaatgtaagaggcagactcttgggagctttgggggacttcttcaatgatgtgattgttttgtctttcccagactttgtgagcatctcacagcccactcaagactatgttcaggatactccataagaagtgctgccttcaccccaggctgctgaaaagcaggtcacaggctaggtgagtcaaccaatagttaacttctgacagacactgttacacaaggttagctgtctagtagagtctcataccaacagagctgactcattactctctgaaatcaaatgtgttgagccttcccctcctccagctttctagcatttttgagcttgggtgagtttacacatgctagagtgaacattttattgatacagctatctatgagttttctccatctccatgcaacccttcacccatactcctgtaagtaattccattaagctcattggttcatcaaattggactttggtggtatccttactttgatctgtcattacttcttatttgaggtgagtccatatgtgttaacatttcctcaggaatagtgtcatgcaatactgcaccacaatcatctttcgtctaaaagtgtcacatcttttcatcatggaataaaatagtcaggataacttatgtaaatattgtgaaatttagctgaattttttctctgtatataaatatatctttctagctctctgggatttagtgaacagactcacttacttgaaatatttcctttattgaaaaaaattttttcattttttaattaggtattttcttcatttacatttcaaatgctatcctgaaagtcccctattacccgcccccctcctcgcttcttggccctggcattcccctgtactactggggcatatgtgtatatatatatatgtgtgtgtgtgtatatatatatatatatatatatatatgtatatatatatatatatatatgtgtgtgtgtgtgtgtgtgtgtgtgtgtgtgtgtgagagagagagagagagagagagagagttccatattttagaggacaacttgtggtggtcagtatactccattactatatggaacactacaggaattaaggttagatggttaaatattggggcagcaacctttaaatgcagaccatttttgatcagattaaaaaaatgttttgtttagtttccttttattacagtaggtataattacttattctgaagatatcaagatatttataattaataatgaattctcataatttcctgttaaagcagtaacttgggaaggcgaagttttgcattgaagctgacctacagtaagtctgagaataaaatggagagaactccatgaacatatttgaagacggtgatatcatttcttaagataagattgcatttgagtcttttgtaaatcttttggttccatattttgctgtgtaaaatgtcctctggtttgtagcctgtggcctttgtagggataactctaactgacttccagtcgctttgggaaaatggcaagcaccagcatctggatcgcttcataaaccctgtctgtccagtctgtgtagcagggagccgcaggtaagcctgcagacatctgttcaccctccttcagtcaacatttaagtaaagttgcgtctgaaatgatctaacatttcccactcatcatccctgcacacagagaagtctaaatcaaccaacactccatcctgccctaacctgtacaagtatctgggtatttactaaagcagtatttcataagtattaatattttatagatctatttgattagattatatagcagttcagcttgaattttttcctgtttgtagagtttttgagtctggtttgagattccattcagctatttcttaatcctgggagggagctttgctttatggtatgtgtagttgagagctcctcccttttaaaatgtgacatttataatcagtgatacaaacagcctaacaaaactatagtaatcaaaaagttttcacaaaagtgtagctttagatataggaagcttatttttattagattgatttttattgccatgaaaaataaaaggaccaaaagcaatttggggtccacacctctactagaaatcccagagaactgcagccatcagagaccaccaggtgagacctctactccaattccctacttgtttccctacaatttccctctgggaaaacccagccgcagtgagttctgccttgccccctctgctctccatttctggactacagcttgcctatatccctggaggcctgtggccatctgggacaactaggtgtgatcttcaaccctcaagttcctactagctggttcctctggcaagcccagcagccacgaagtcttccctgtcccctctgtgctctatcttctggttctcacctctacccgcaatgccagagggccacagccaggtgagaccctatcctaactccctgcctgctgccctccccaggccaactctgctgcagtgagctctgttctgtcccctctaaactcaggccacagctctgcctgcattctacctggccatacgggactaccagctctgcttgaatctctgtaagcctgctgccactgggggcaacaagctctatctgcaatcccagaggtctgctgccatcagagactaccaactcaaactgcatgcagccctagaggcctgctgccatataggactaccgggcctgccaacactaggaacaaccagatggctaaaggccagggtaaaaacacaatcaaccaaggtcagggcaatatggtaccaccagttcccagcaattctaccatagtaagacctggatagcctaaaacatctgaaccgcaggaaaatgtccttaaatctaatcttatgaagacaatagaggcctttaaagacaaaatgaataaatctcttaaagaaatatagaaaagtacaatcaactaagtcgaggttcttaaagaggaaatgaatacatataaagaaatagaggaaaatacaataaaacacgtaatggcaataataaaactgttcaagatttgaaaatgagaaaaagaaattaaaatgctcacaaacgaaggcaatcctggagatgaaaaactgaggaaatatagatgcaaacatcaccaacaaaatacaagagatggaagagagaaacacaggtataaaagatgcaacagaagaaaatgttaaatctttttctttttcttttttttaggtattgtcttcatttacatttccagtgctatcccaaaagttccccacatgctcccccacccactcccctacccacccacccnnnnnnnnnnnnnnnnnnnnnnnnnnnnnnnnnnnnnnnnnnnnnnnnnnnnnnnnnnnnnnnnnnnnnnnnnnnnnnnnnnnnnnnnnnnnnnnnnnnnnnnnnnnnnnnnnnnnnnnnnnnnnnnnnnnnnnnnnnnnnnnnnnnnnnnnnnnnnnnnnnnnnnnnnnnnnnnnnnnnnnnnnnnnnnnnnnnnnnnnnnnnnnnnnnnnnnnnnnnnnnnnnnnnnnnnnnnnnnnnnnnnnnnnnnnnnnnnnnnnnnnnnnnnnnnnnnnnnnnnnnnnnnnnnnnnnnnnnnnnnnnnnnnnnnnnnnnnnnnnnnnnnnnnnnnnnnnnnnnnnnnnnnnnnnnnnnnnnnnnnnnnnnnnnnnnnnnnnnnnnnnnnnnnnnnnnnnnnnnnnnnnnnnnnnnnnnnnnnnnnnnnnnnnnnnnnnnnnnnnnnnnnnnnnnnnnnnnnnnnnnnnnnnnnnnnnnnnnnnnnnnnnnnnnnnnnnnnnnnnnnnnnnnnnnnnnnnnnnnnnnnnnnnnnnnnnnnnnnnnnnnnnnnnnnnnnnnnnnnnnnnnnnnnnnnnnnnnnnnnnnnnnnnnnnnnnnnnnnnnnnnnnnnnnnnnnnnnnnnnnnnnnnnnnnnnnnnnnnnnnnnnnnnnnnnnnnnnnnnnnnnnnnnnnnnnnnnnnnnnnnnnnnnnnnnnnnnnnnnnnnnnnnnnnnnnnnnnnnnnnnnnnnnnnnnnnnnnnnnnnnnnnnnnnnnnnnnnnnnnnnnnnnnnnnnnnnnnnnnnnnnnnnnnnnnnnnnnnnnnnnnnnnnnnnnnnnnnnnnnnnnnnnnnnnnnnnnnnnnnnnnnnnnnnnnnnnnnnnnnnnnnnnnnnnnnnnnnnnnnnnnnnnnnnnnnnnnnnnnnnnnnnnnnnnnnnnnnnnnnnnnnnnnnnnnnnnnnnnnnnnnnnnnnnnnnnnnnnnnnnnnnnnnnnnnnnnnnnnnnnnnnnnnnnnnnnnnnnnnnnnnnnnnnnnnnnnnnnnnnnnnnnnnnnnnnnnnnnnnnnnnnnnnnnnnnnnnnnnnnnnnnnnnnnnnnnnnnnnnnnnnnnnnnnnnnnnnnnnnnnnnnnnnnnnnnnnnnnnnnnnnnnnnnnnnnnnnnnnnnnnnnnnnnnnnnnnnnnnnnnnnnnnnnnnnnnnnnnnnnnnnnnnnnnnnnnnnnnnnnnnnnnnnnnnnnnnnnnnnnnnnnnnnnnnnnnnnnnnnnnnnnnnnnnnnnnnnnnnnnnnnnnnnnnnnnnnnnnnnnnnnnnnnnnnnnnnnnnnnnnnnnnnnnnnnnnnnnnnnnnnnnnnnnnnnnnnnnnnnnnnnnnnnnnnnnnnnnnnnnnnnnnnnnnnnnnnnnnnnnnnnnnnnnnnnnnnnnnnnnnnnnnnnnnnnnnnnnnnnnnnnnnnnnnnnnnnnnnnnnnnnnnnnnnnnnnnnnnnnnnnnnnnnnnnnnnnnnnnnnnnnnnnnnnnnnnnnnnnnnnnnnnnnnnnnnnnnnnnnnnnnnnnnnnnnnnnnnnnnnnnnnnnnnnnnnnnnnnnnnnnnnnnnnnnnnnnnnnnnnnnnnnnnnnnnnnnnnnnnnnnnnnnnnnnnnnnnnnnnnnnnnnnnnnnnnnnnnnnnnnnnnnnnnnnnnnnnnnnnnnnnnnnnnnnnnnnnnnnnnnnnnnnnnnnnnnnnnnnnnnnnnnnnnnnnnnnnnnnnnnnnnnnnnnnnnnnnnnnnnnnnnnnnnnnnnnnnnnnnnnnnnnnnnnnnnnnnnnnnnnnnnnnnnnnnnnnnnnnnnnnnnnnnnnnnnnnnnnnnnnnnnnnnctttaaaaaacacaatggcctgggtagatgttttacagtctcttaagcctatgaatgataccatgtcaaactttcaaacactatatggacagaaaaaaaaagaaaaaaccaaaaaaaaaaagatattctttgagaaaacaagagattgttgacaagagcctcaatcatccattggatggaatacaaggtccccagtgaaggagctagagaaaggacccaaggagctgaagaggtttgaagccccaaaggaggaacatcaatatgaactaaccagtacccccagagctccttggaactaaaccaccaatcaaagtaaacacatggtggaacttgtggctctagctgtatatgtagaagaggatggcctagtcggtcatcaatgggaggagaggccctaggtcctgtgaaggttctatatgctagtataggggaatgccaggaccaggaatgggagtaggggggttggggagcaggggcagggggggagggtttaggggattnnnnnnnnnnnnnnnnnnnnacacaccacacacacacacacacacacacacacacacacacacacacactcactcacactagcaccatcaatagcaatatactaggaattaacaaccattggtcattaatatctctcaatatcaatggagtcaactcccacctccccaaaagacacaggctagcagagtggatgtataaagaggatccatcattctgcttcatgcatgaagcacaccttagcaacaaagatatagtaaagagttttaaaaaggttttccaagcaaacagactcaagaagcaagctggagtagccattctaatacctattaaaatagactttcaaccaaaagtaatcaaaagagatggggaaggacactttatactcatcaaaggagaaatccaccaagaggacctctcagttctgaacatctatgcctcaaatgcaaggacatccacattcataagagaagctttactaaagcttaaatcacactctgaaccccacacattaatagtggaagacttcaactctcctctctgaccaattgacaggtcatccagtgagaaactaaggagagatataatgaaactaacctatgttttgaatcaaatatacctaacaaatatttactgaacatttcacctgaacgcaaaagaatatactttattttcagcgcctcatgggaccttctccaaaactgaccatatgctcagtcacaaagtaggcctctagatatacaagaaagttgaaataactcatcctatcagaccaccatgggttgaagatgaactttttaacaacaacagaaacaacggaaagtctagaaactcatggagaccgagcagttctctacccaatgattaatgggtcagggaagaaataaggaaaaaactttctggaattcaatgataatgaaggcaaaacattcccaatcttataggacacgatgaaagcagtgctaagaggaaagctcatagcattaagtcttcataaggaaattaaagttcttataccagcaatttaaaatacaactgaaatctctagagcataaagaggcaagcacacacaagagcaggagaaggcaggaaatagtgaaaacaacagaaactaaggaaagtcaaagcatcattaggtctttcaaaagcctgtactccataaaactggaaaatataaatgaaatgaatggttttctagatagataccacttaccaaagttaaatcaagatcaggtaaagtatgtaaatagttcaatagcccccaagggagcagaagctgtcattaaaagcctcccaaccaccaccaccaacaacaaaaagcagggcctgttcttagatgctttgacccagcttctagcccattgtccaaaggtaggggagcaaaggtggatattcaaataggatattcagcaatgaaactctgtcaatgactcttaaggttttgttgaaaataggaacaatcaacaagagtgaggtgctatactgccatgttggaataagaacaaatctcatatgagtctataacacatttcagaagcagccatgaagaataggtgtaaggaggcacagaacactcccaactgtgtttctttaaccaagttcatgagaaaagttcattggatatttggccctcttgaattactcataggacaataattgattgtgaccaacatcagctactttcccctatgaatctggagatttagatctttgtggtttcttatgcagctacagcaaaagtggaaaggctatttagaataatttaatcatttatatgttactcaccagcaaggaatcagctttctaaacattctaggtatcaacatgaccagaaaagttatttgtgattttcaaaatatatacctctgcttggagcactttgatcttacttcactagacaagatattaattgaagcatgacctctttttggaagggcttcctgttcctggagggcttttcttgtcaaagtccaatgtaaggacttttgtcgttatccacaggcctgttagaagtgtcagtgagctggggaaggactgagttggtaaaacatacacagtgaaagcttgaacccctgtatttagattccaagaacccacataaagtgacacatgatttcagacttctgtacatacttactccttactgaaaagatatatcaacatactattagctaaagcaagcttctagaaaatagaaatcaaggtagttgaagaaatttaagaactattaacaaatattcaatttaaagtatgttcaaaattgatttaaaaattttaagtggagaaatctaatcaaacatggaaggtttttggttgattcatttttcttatcttcaaagttatcttcccctgggtgactaatgttacagttttggattagatttatatgtgtaaagcacaacccaaaatggtatttttttgcaactgcaatttaaggtgtgctttaaaaaagttgaatctcctatttgtattggcatgaagaataattttatttcctttattttttgagatcataatataattacatcattttcctattctttcttcccacctattctctcttaactttaaattcatggcctcttttttcactaattatttttacacacacacacacacacacacacacacacacacacacacacacacacacacacacactcctaaatacataaaacaaacttttcagtcattataatgttacttgtagttgtatcttcttagggctgatcatttggtattagatagtcaattgatgttctcttccttgaggaagactatttaccctctctcagcagattgtatttgcctgcaactctttctggaggcttgctacctcatgatttccccccaaaccatcaacattagcttgtctatttcggccttccttatcaagtcgttgtttatgtgtcgtgttcaggagactttctgcgtgctaagtcctgacattctagaaggcacaacctcaaggaggcgcaacctcaaggcactccttgctcctttgtctcctaacagtctttccacttcatcttttacaatcatccctgagccttaggtgcaggagttatgttgtagatgtattagtcaggactggtctccacaactctgcagtttgattggttgtggttttctataatggtctctctttgttacataaaaagccaaatctgtacataagaacgttattcagagtttagttagggagtatggtggtttgctgaagtggtgatttaaaactctcattcaaaaatatttcccacagggacctaatcctttgtctcattaagacatatttgcctattattgctttgagattatacatagaaatgtcttatatcttggctgctgcaataggacatatttttcattagtatttatttcaaacattgtttttgcatattgaatttatgtgtcatctcaacatggttatatccagatgatgaagaactttctgtgtttaattaagttgtctgttatgtgtatatccagatgcaaatatattttccttatgaaggccactctgctctttgcaagacatgagaagtcattatctctgttgttttagtcactgagtttcaaaatgtgatttctgcatgattatttaatgacaattttaagaggaattttttaagaacatctttatttttctctatataattcagtcatattaaatgtagaattttcaaactataagaatctcaagactattatgttaataataaactcctgggtgaaagcttaaaaaatgtctaagagagttggaagccatatcttttcttctggtataatatcaacagggctatggccactgtacagaaaatgttagtatgtgtgcactttgctataggactacaggagaagtctgaacatctattgagattcagaggtttccatttaggctgtgattagtagcaagtgcatcttctaactctcgagaccctggatattttaagtgctccagtgaagtcttggagttactctatggtctgggaaagtgccttcaaatagtcacatcatgggaaattataatacctccccctccagggaatagtgggtggtttgtttctcactgattaatagagaggcttagagccaatccccgtatctctaagtgaaataaccctgtgaaaaaattcaggcttcactattcactgtggaatctgagtgagtctaaattccaaccaaaatcacatacttttttacatagggagggaaaacaacaggcaaatgtgtttggattgttggtatcatttcactatagcaaagtgtccgagataaatatcataaataaaagatttattttggctcatggttctggaggctcagtgtctagaatgggtaatgtcatagctgtgcacctctggtggccatgctgggtagcattggtggaaaaagcacgccgctacaaacttcttaccttctggtcaggaaacattaaaaagaaaccaattccagatgctgtcaagttgacaattgagattggccgacacaaagtggtagctcctcagccctcttcatgtcctcaaggacttcacactagaccttctttgtatatgctctactttatctttcagcagtggtgcgctgaaaaccaaccctttgctataaggagtttgggggacatttattcaacccacagcgggggaacagacttgattaggttcttgattcagaacgtgacaatgacaattctgcagtacttacagcagggctattctggccacagtgaacaggaacgcttctgactctgctcctatttaaccttctgagtgctagtgtcattagtcagtctccgggttgattgcctcatcagccccgttcccatactgaacgcaggttctcagagttggttattgtgccattggcgtctttctgttgcagagtcatacataacctagggcagaagtagagttcaaatgccaagtttttcttttcagtacttttatctaaaattcaaaaagagaaattggagtaacagactactaacagcaggaggcctctctcccccagacttctgtctcttggacggtcttcatttcctgcttacaatcaggctggactcccaaaacttagtccagcgctatgagcacacagttttaaaggcagtaacttacataacatggggaggaaaggaaggtagacaggctttaagtcacctggtcaaattcacaccaacttggcacggccttgagaacagactctttcttgactctccaaatgtaaggtcaattctagatccgaaattgggcatctaataaatccttggagaacaaaacaaaaagacattcaataacacattacagaatagcatattagctaagaactaatacgaaccctaagatcacatataataaggaaaacaagagctgtaccaggtcaccttcttcagactcatgaggttgaaaaggcgaaagccaagagaggccaggtgactggtgcatatgctcacagatagataggaagcttgtctaacctatggcagatctcttgataaaatgtgctgtctaggagcacggagctgactagacaccctggaaatctcccactcagacacacagaaactctaggctgagcccagcagccagccattatcatggatgaccaagcttgtaagaatacagaatgtgagggagttatgataaaaaactgtcagaacacagagcttaacagtattgagctaccagccttttcaggaagggaaatttaggaacatgaaagaaataatgaaaagggtgtagggtatttgatgagaaaggttgggcatgggagatataaaaacatataaatgttctaaattcagtggtcgccaaatgattgtaggctgtgtttttaaaaatgtaactaaaacaatacatatgaaataaatataaggaaggagtaagcattaaaggatacacaatatacaccagagaaccattaaaagaactatgtcatttacaaaactgtattatatttttggataaaagcaactttcaggctaatatgttcagtgaattctaagttctaaacatctaagtcttaaaacacttttatacacacacacacacacacacacacacacatacacacacacacacacatatatatatacacatatataatatatactatatatgtatataatatatactatattattaattaattaattaatttgtttgtttgtttttttgtttatttagagacagggtctcactatgtagctctgactgtcctggaactcactagatagatcagtccggcttcatactgacagaaatccacttgcctctgcctcccaagtgctgggattgaaggcatttgccactatgcctagctagtcttaaaacttataaagtaaaaattgacaaaactgcaggaaaaatttggcaaaacttttacaaatgtctctcatatctgctagatttcatatttttagagagaagaagactgggtttttggagtccaataagataatattttgaaagaaaaccagacatcacccttcttcacctcctctcaaaaaagaaaaaagaaaaaagaaaataaaaaattgaaaacctataggatagcctgttatgaacttagattgaaaaattgtggaaaagtctaacaaaggtgattttgtatcatacttactaatatgcttatacaccacaatatagattcctcggaaatagatggagagatataatatataggaacaaacatgcatcttgacaaaattggattattacaacttttccaaaattgtctatgtggatttacaatctgaaatactaaaaaatttacataaatatcattagcaccataataggataaagataaaaagtcatggcagtttcaatagatgcagcctgaaaagttaatagaattcagttacaattcataagaaaaaacaaagtggatagcagactaagaatagggggctttgggaatagcatttgaaatgtaaatgaagaaaatatataatacaaacaaacaaacccaaagtgattggcccaccatctggactctggtcccagccttaaccgaaacaaaaacaaagacaaaaaagccaattgatttcattttttgtagtaggagaatttgactaggattctagtataaaagttccaggacagctggagctatacagaaaaaccctgtctcgaaaaaccaaaaacaaacaaacaaaaaaacaaacaaaaccctaaaacaaataaacaaacaaaaccccaaaacaaacaaacaaacaaagcaaacaaaaaaccccaaaaagttatacttttctgccaatttgatataattttcatttaataattaagaacaaaataataatgttggctgtcaatgtttagctgtactaagtgctatagacatagcctcaatgtcagaagtaaagaaattcgatgcataaggactgaacagaaacccgctttaaggtcatgtaacattatgtaatggttttctatgtttccctagcatttttatcatattatctagtccattatttctaactttgtattataatcccttttaagaaaatttctcagtctgtccatgagaaaaatttatgaagtatgcttaggagataagatcaaggatattgtaaaggaatgaattttaaaaaggaatgataatgtgtactgggcccatgaatttctatctctataaattaaaaaacattgcagccctttggagttcagtatatcttatattggaggcagagtctagaatagtttcactatttcatgtctgtggaggagcaggtggtaatctgtttcctgccttttgtttcttctggtggctcctggacttaggccacccttcaggtttctgacttttctgtgtgtgaaagaaagccccacctctctcttttaaggttacagtggtcacatttgcattcaatgcaggttgaataaagcatcttaaatctttcctcacagttgaaaagcggtgttttccatataaagtgagactaacaggttccagaggttagggggtgaatttttgagaagaaaggcttttttcatatcagtataccgaggcttcttacttaatattctctccgttttttcctcgctctttccattagaacacatctttcaatagttttagtcaacacacacatgagaaaattgagatccggtgttttaaaagcttcatacatgatggtgattttgtgcatagaacaataggatgaagaacaatcctgttgaaaaatgatattagcacagtagcacttgcagctttccttgttattcttcaaaaataatgttttaaaagacttgggacatttaaaatctcaatttatgaatcatcttaaatgtctatctctagtgtgaactcacttgaaagtacgttatttaatttgtgctttcatttttcagtctcccaatttttaaatcaaatcgctgatgagtgtaaaactttagctttaaactatttcagtcctatgtaattagtaagacaaagtttataaatagaacacagtcatatttatctcataacaataggtaaaatatttagctgtcctggttagggttactcttgcttaataaaacaccatgaccaaaccaacttggggggaaaagggctcagcatacacttcatgtcactattcctcatcaaagtaaatcagctaagaaactcaaaacagggcaggaacctagaggcaggagctgatgcagaggccatggaagggtgctgcttactggcttgctcatgatagcttgctcagactgctttcttatagaaccctgaaccaccagcccaggaatggcaccacttaccatgggctgggccctcccccatcaatctcaaattaagaaaatgttccacaggcttggctacacctcaatcttaggaagagatttttcttttcaactgaggctccctctcttctctctaatgactagcttgtgtcaagttgacataaagccatgcagcacatgaataaaattaatgacagctgaatgttaatttcatttttatactgtatagttttgatttgtttatcctgagtcttttgatagagatgctagctttaattgaacaaattagcttttataccagaatctgatacaacaattttaatttttagtatttggatttcagcaaccataaagaaaacttagctgatagattttatcacgtggattaactcttataataaggtgcctgagaggaagcattcgaactgaaatgagtgttcagctcaatgaggaaaaaaattaaagcccatcgaaagttaccagcattggtagaaaaaatagttttagtgaaaaatgatgcctgtggggaaaagccaaccaagagtgtcaaacttttcccatttattaacatgtgaaatattggaaaaatatttcatgaacataattagagttatagtaacatagtaaatggaaacattcttcataaagtatgacaccttattattaatagcaatagctaaaacatgcagaaatagctaaatgattagtgtaaattattgtgtcaacactactattctagatatttttacgttcagaagtttctgtacagaaataaactgttgggtttttaaaggaagtattttatttttgaaactttattttaacaatgactgcttttcatgcatgtagtggtttgaatgaaacatgtccctcacaatctctggtatttgaacacttggtcactaattggtggcatgttggggaggtttaggagatggagtcctgctggaggaagtacgtcaccagaggtgggctttgactgtggataggtttgcctcacttcctgtttgtactttctgcttcgtgctcgtggtaaagttctctctcttcttcatgttttcagtaaagaatgtaagaactcattttgctagttcagaatcactttttatttcttattctctgaattgctacaataatgctcgtggctggagacttctcctgttatgtaaacatcatggaacttagttctctctggaagcttttttcttctgcagggaaggggcatcttcttagaatgccctaaaacctaattttatgggttttctttggtgttacattttcactcattattttcttcaaccattttaaacataagccttcgttcacatactgcttctttcattttagggcatataatcatttcagttacagggagggggcaccccatcatgatcaaactgttacttttaggttttacaggcttttagattgtggggtttcccctttacctgacacgtctgctttccatcctgtcttgccctgtttgtggaaaaacttgctgtaaagtaattttgcatttctgcttgtatttcttctcaaaactagtacttacattattttgtcagcttgggaatttctgttctcttaaataacgcgaattatgactttatatatctgtattttagaggcacaggtgccaccttcttatggaggaatgtttcagatgtttttccttgcaggcttcatcgtggttcctgctgggtaccttctgtggctgttagatttgacacagcacagtttctgccttgcaagcgctcagcgttgtaggttggcttcagaagtagatactgaagttagcatttatgtggagctgatttattattagtaagtctcccaagaaaagcaagaacacggagaaataagactgaatgggctttcggccaagtaatggtagaaagccaagggaaatcccacttggcaatgtttgaggtctgaaggaagtttgaaggtcattctttaggtttgtcctcattgtgagggcatttgagtgattacagagcaattaaaggcttaattaattaattggcattctcaggatgttcatttcatactattgttcaatggaggaactaatagcttgaagccaccttctaggcaaagagatgaagtgaaggtatacagagagataatgcactggggttgtcaagagtgcaaaagaaccagggcagagcgtggcttgcctgttgaagcctgtcttctgactggggctaagattagagcgaaatccagtataagtctgtgtacttatatttatatccccttatggtagctgcactggtgaggaaagaatagcactgtgtccacatcctctgtttgaaatcctctggaattcagcatcacctttattcttatagtaaaaattaaaatgatgtcatcttgcccattttttatgagcttgaaacaggaatgtatctactttagtgcattcctccagagaatatgaaatgggatgtagtatgtctaacctaacgaggagagagagagagagagagagagagagagagagagagagagagagagagagagagagagagaacatttcattgaatataaattgatgggataggcaaataaaagaaacaacttggattcttttaaaataacctagattatttcgaagttaggttggcctttaggtagggtgttgactgtagaatcatttgaaaatagtagaatgtcttataaaattacaagtaggtattttctgtaaaatacagactcctgactattttattagtaatgtgctgaagacagcctaaaatgccttaccaaatccgtgttgctgcaatcatgtaatttctcaagggtaagaataataaaacttaggtggcaccacattccatacccttttattacctcattccatgctttctaaatatagtgatctgacagacacaggcaagttagcgaagcaaaatagcacataagtgaagcccagaatcttattattgaggcatgactcttctttacagggactgatctgattcgtagggctgtgcaggaagagatgtgctctctctctctctctctctctctctctctctctgtgtctgtgcaggtgatcatgttttaaatagatttgaggaaatctgactaccatatctttgcctctggagctataacttaagtcaaagggtttgtttttctcctcagagtgcttttcactgtccacactttctaaaacaaaataacaaaaatgaagactgaggaaaatggcacaaaaacaacaagctagtggtatcatagccactgagctgtaggatcagacctgggtgggccactggattttcagttcaacttttgcagtcttcatcaggttccatagctccctttagacacccagttcttcttttgcaaagtgtgcataaaaatcacactttgccacactagtagtgtagaggggtcaggtgatgtaacgatgcatacggtccatcacagtcagtaaataaatggagtggtcctgacactattgtaactctggtgtttgactatgagtaatggcttatggaacttatatttctgttaacagcacatatgacagatgcaatctgctttctgttctgtttcttctcttcttcattccctcctccttcctttccttccataggtctatgtgctagattcatattcacaacatgttaaaataactcccattgctgccatatgtattattaaatcaggaaatacaatctctctaaaacaccaaatgaaaatatacagacatttacagaagactttccaggtttcagccagacccccagggactcagtgcgctggtattttaagcaacctacttcctctctttcaagattggcaaaggaaaattatgttctaattccagacactatggcgctctgtgtactttgcctattaatttactataaagctcggctaaagcatgtatttagtttttcatcgtaaaaaaaaaatcatacattttaaacaagacaaactaaactctagacacaaatacagtaagtccattttgccaagtagaaattgccaactttctgagatacactaggctaatgggtcattcatcactcaatcatggtcaagccctgcatggcttcagttaatagtctctgttgattttattatgtaaaggttaacaatagacagaccagttctggtctattgtgaagtctgtctgtgttttaaatcatattcctaaaaaagcctttcaaaccgacactggccacttttacttgcaaatgacatttgttgaggacttactatgaccaaaaaaagctgccagactcttcacaagaacagaaatatgtcaaatgatgcctttgtgctttaaaaaaacaaaaacaaaaagcaaaggattaatattttttctgtttctttacacccaaaataagtttcttttctgtgaaacagtagaaaacttattaagaaggttaaactgccctttggattagatggtactgtgtaagagctatagattctggtgtgtgccctaataacgatatcccagtgacatatgcaaggttttaatacgtctgtaaatcacaggtattgccagaaaaggaacccaaacctgcctttcctagaaaatcctaggaattgtgtgagaattaaataaattgatatggttgtaaatatcactacagtcctacaactgaataggaactcaagaaacccctttgtgtgcgtcccagtgagtgatcatctttcactcaggctttatgaaacacacactctgtcatggtctgtggctcatgtggagctttgttcttgacagttagtagctagtcatatgttactctaccattatgacagtcccatgcaacttgagtttggtttgtgtctcatggataataaaaatctaaaccataaagatttaagttagttgcacaaaaataatggcccacagtagtggaacaatttttggacccatctctacccaacccctgaatccaccctcaccttttctactgtgccacatgactcctaaatttggtaaatttcaaaccatctgcatggatcaggtaatagcctaggctaactcaaaatctgagtctttcttgttcactgttctaaccttggttcctttctctttggtcttagttcaattcaatatgagatatttcattaaagtggtatgaagggcctatggcaacgcaaggcaaaaattaattgagttgggaatattcattagaactagcagggtgaacctgactgggcaggcattgctgagtacgtgatcgatagggagatatgacagcatttctgtggaattgataatgagttggagagtttgttttgcaaacccagctttaatattaatattaaatattaatatgaatttaatattaatattttttatcactcaaaggtgctagttgtgaatagtgaatatataaaaaaaatctccgaccacagtactttaaatttttgtgcactataaatgcattgtactgctaatgggtcaaggtacagtttatttaccatatgcagtagtgtatgctatgttgctttctctattgatttatctttggagagcacagcatttagtagcttggtaaaggagaacacgttatttcactaaagataatcgacttcagtcagtaactctcaaaaacagtgctcacctctgaggccttacaggtggattctgtaacttgatagttagatttcatgatcggttaactcggctgtagaaaaaactggcctggattgctgttggaaaacaccaagaggagaaccagtcttttcatggtaagctgttttctaaaaaacaaacagataaaatcaataatgtaaaataccagtgctgtttccctctttttaagattctaatgaatgaaagttggaggtttgacccaagattagaacagtgaataaaaaaaagactcagatttttttagcctaagctgttacctgatccatgcatgtggttagaaatttatggagaagctagagaaagtatccaaggagctaaagagatctgcaaccctatcggtggaataacattatgaactaaccagtaccccagagctcatgtctctagctgcatatgtatcagaagatggcctagtcggccatcagtggaaagagaggcccattggtcgtgcaaactttatatgcctcaatacaggggaacgccagggccaagaagtggagtgggtgggtaggggagtgggggnnnnnnnnnnnnnnnnnnnnggtatgggggacttttgggatagcattggaaatgtaaatgaggaaaatacctaataaaaaaatttaaaaaataacataggagcttaagtttcttccctgtgagatccttcgatggaattctcttgcctagaaattgtggttgctatcatatacttcatatggctatcatatacttcatatggctaccattctagaagttaaggttattgggaaggatctccaagacatagaccaacacggaccaactttcctagagttaaaaaaaaaaagaaatttaccaaatttaggaaatattgtggtagagtacaaaaggtatcagtgagctcagggattgtgtagagatggcttcaaaacttgttctgctactgcaggctgttatttttgtgcaactaacatacatcttcatgatttagatttgtattatcaatgaggctcaaaccaaacaatagcagcatctaatgcttcacagtgctatcataagggaagagtaacatgtagctactgaatgtcaaggactaagctagacatgggctatagaccatgtcagagtatgtgcctcacagagtctgagtgacagatagtcagacattcagattcacacacagaacatacaatgtcacttagaaaagagatatcccaagaagaaaaaaacccatatttttggggagtatgcaacagaaatttggtttgtcgagtttggtcatgctgacaatatggatttgtgcttcaatgaagaggatgagtcgagagctagaatgatgccattgctggaagcagagggatgtgtatcaataccatgcaggccaatgatgtcacagcagaaaggatgagggagaaatggctgaagaggagtgacaggcaatattaaagaggtgggggttttaccctctagcactgaaatttattgaatggtttctaaggtgtggggtaatgtaatttgatttcatgcctacttgtcagaaaaacaagcctatgggaaccaaggaaatcatgcaatatttgtaaagtacaggatgctatagggttatagacagaaggggatactttgtggttttttatgatcaactgaatgagcatgctgttgagatggaggacccaggcctgatgggactgtttagatggttggtgccatcttttgagagaaaaactgctgcaagagagaaaaataatatgtgatcttgatctttatgtatctatttgaaatacattgaaacatatatatccatacttacaggagcatttgggttttggaaaaggtaagatgttgactgtttttctcctgtacttatatcttcagtatggtttcttttgatgttttcttcttaattttggatattttcattcttgtgtttacatatcatggaacatacttgaaagttgcaggatgactccatggagttacttctctctttccatctttattggggttctgagagtaacactcagccaatcatacttgcatggtaaagctttttccatagagtcatcttgccaaccatctttctggtctgtcttataaggtaattcaattttgtttacaaacaactctaaaagaatgaattaacatggcttttctctgagatattatactacctcgcagttcaagttgcatattcaccacttgtattagtctgggttctctagaggaacagagctgatgtgtgtgtgtgtgtgtgtgtgtgtgtgtgtgtgtgtgtgtgtgtgtgtgtgtgattagagatcagcttacaggacaggcatgctccagttagtacaacaatgactgtctactaaactgaaagtccaaacatccagtcatttttttgtccatgaggctggatgtcttcgctgtttttgtttgtttgtttgtttgtttgtttgttttttggtaactgttggaatcttcagaagtaggatccaatggcaatgaaggaatgggcttgctagtgaaagtgagggcaagcaggcaatgagccaacagtttccttcttatatatcctcctttaaagccaccagaagctgtggcccagattaaaggttgaccttcccacctcaaaagagctgagatgaaggcaggtcttcccacttcaaatgatttagttaagaaaccccacccccaacaggtgtaccatgcggcttgaggtttagtcaatttcagatacagttaggttgacaaccagcggtaaccaccacacttctttatgttccatttactccgttgtttgttcccattctagtttggacgacctcctttattaaatggaacaattcttatttttttgactgcaggattttgtgtcagtgtacatgatcaactattcaatctgatattctgtagaaagaagtcttacgctcagttaatctaagccaaaactcaggagcttccaccacaaaatgtgatgttttcagtgaagagctcacagttaaatcccttagagaaggcaaaaatctatcaattagtcttgatgttttaaattccattgccacccttattcagtgcgcaatcattgcaggcatcgtgcttacacattctctgtgtctacttcttcatttttgtagccatcttttatccaaggtcttgatactagtgcctttttagtgcataatgctttgctgtggggaagttatcctaagtgtagtggaatgcccagcagtgtagtgtcctctacttatctccatgattttgcagattgacaaatatataaaaagggtcaaatctctcctcagtggaaaatcaacacttttgtccatgtcacagtcatttttgtgcctttacgggcttcctgaactttagactccacatatgattcatttgaagctattctgtgcccattgccgtagaaattcttttcacagagcatatatcctcatgccacatctttgccttccaaaattctgtgtatttacattgcttcaattacaatgcttgtatctactgtgatttacaggataaggtttgatggtcctttgtttatggtttggtcattttttatattatcctattctgattgatattctggtcagagatgccattttctgcttcaggtctattgtgtatactattacctcgcttgagatatccttttctcacttttacccctgtgctgtcattctcagcttggtcttgctaatacgtctttactcttcatttgtttgtatattagtactttattgagtgatccataccaaatataccattggacagaaaagcactgatctaccaataagtgatgttttactttgtaggaagaaaaatgaaatatttggatatgatttttttgaaaatatttatgccagggtaccagcacggttcttatttttccattgtgaaatgtttcctgtattaaagattgcctcctgattctcatgttacttgttattaacaccctctaattcttctttatagcatatattgatttttaggtttatttttgttatttaaatgttttatttcctgatactctaatataattatatcaattctcccttcccttttgtccccgctctctaaagcctcccatatacccctcatttctctcattctaatttttattaattattttattgtttattatatatattgtgtatatatgtatatacatattgtgtctctctctctctctgtgtgtgtgtgtgtgtgtgtgtgtgtgtattttattcctaaacatgtaagctctatctgtataataccacttgcatgtgcattctcaggtttcaccatttggtactggataaccaatcagtgtgctctttccttggtgagactatttcatgagtaagactctagtgttccttattccttagttgcctatttttcttttgtagagttgaggcctcatgggttttccttagtcagttttagcctgtctgttattgttgtccttgctctgctcatgtttaggtgtgcttgttggtgggactctatgtgtgtggcttctaacatttcaaggagacactgactcggagcacagtccctgttcctgtggcttttacaaccttttcactcttctgcaatgatggctgagccataggtgctagagttgtattgtaaatgtgtcatttgggatgaggacccataatactgcattttgactggttgtggttttctgtaatgatatccatctattgcaaagagaagtttccttgatgagtgatgaagactatacttaatagggacagatatttggaatatagttaaggattatacagattcaataaagtggcagttgtaggttcttctctgaaatttatgactcagttatacttatatgtgcaggggtcttttgtcaacatatatgtctgtgtattgttttcacatagtgctcatggaagccagaaaagggtcacattttctggagttccagatgattgtagacaccacaacaatactgagaatcaaacccaagtcctcttatcctttttaacattggatctctaataccttgtgttgctactgctgtgttttgcccacaagagtggttcaatgagtgcatgagaaaatgaacagaagtattttgtatacatataaacaatataattgccatgatagaaatgcttttatttttgattaaatttatcagtagagatggtttttatttaaaaaaattaaatttatcattttctttttttcatttttaatgcttgcttttaaaataaaattgtggtatatttctgtatacacttcatattgtgaaaaatcaaatctattctgggatatcttagcattttatgattaggtatgctccaaaacatgttctttttttaattgggtatttatttcatttacatttccaatgctatcccaaaggtcccccacactctctgcacccactcccctaaccacccactcccacttcttggccctggcgttcccctgtactgaggcatataaagtttgcacgtccaatgggcctctccactgatggctgactaggccatcttctgattcatatgcagctagagacacgagctcggggggggggggtattgattagttcatattgttgttccacctataggattgcagatcccttcagctccttgggtactttctctacctcctccattgggggccctgtgagccatccaatagctgactgtgagcatccacttctgtgtttgccaggctccggcatagtctcacaagaggcagccataaaatctttctagtgtatgcaatggtgtcagcgtttggaagctgattataggatggatccccggatatggcagtctctagatggtccatcctttcgtctcagctccaaactttgtctctgtaactccttccatgagtgttttgttcccaattctaagaaggggcaaagtgtccacactttgttcttcattcttcttgagtttcatgcgtttagcaaattgtatcttatatcttgggtattctaagtttctgggctaatattcacttatcagtgagtacatattgtgtgagttcttttgtgattgggttacctcactcaagaatatgccctccaggttcatccatttgcctaggaatttcataaattcattgtttttaatagctgagtagtacaccattgtgtaaatgtaccacattttctgtatccattcctctgttgaggggcatctgggttctttccagcttctggctattataaatgaggctgctaaaaacatagtggagcatgtgtccttctcactggttggaacatcttttggatatacgctcaggagaggtattgctggatcctctggtagtactatgtccaattttctgaggaaccgccagactgatttccagagtggttgtacaagcttgcaatcccaccaacaatggaggagtgttcctctttctccacatcctcgccaacatatgctgtcacctgaatttttgatcttagccattctgactggtgtgaggtggaatctcagggatgttttgatttgcatttccctgatgattaaggatgttgaacattttttttcaggtgcttctcagccattcagtattcctcaggtgagaattctttgtttggctctgagctccagtttttaatggggtcatttgattttctggagtccaccttcttgagttttttatgtatatattggatattagtcccctatcttacttaggataggtaaagatcctttcccaatctgttggtggcctttttgtctcattgatggtgtcttttgccttgcagaagctttgcaactctatgaggtcccatttttcgattcttgatcttacagcacaagccattgctattctattcaggaattttccccctgtacccatatcttcgaggcttttccctactttctcctctataagtttcagtgtctctggttttatgtggagttccttaatccaattagatttgaccttagtacaaggagataggaatggatcaattcacattcttctacatgataactgccagttgtgccagcaccatttgttgaaaatgctgtcttttttccactggatggtttttgctcccttgtcaaagatcaagtgaccataggtgtgtgggttcatttctgggtcttcaattctattccattggtctacctgtctgtcactataccagtaccatgcagtttttaccacaattgctctgtaggacagctttagatcaggcatggtgattccaccagaggtgcttttatccttgagtagagtttttgctatcctaggttttttgttattccagatgaatttgcagattgccctttccaattcattgaagaattgagttggaattttgatggggattgcattgaatctgtagattgctttttggcaagatagccatttttactatattgatcctgtcaatctatgagcattggagatctttccatctcctgagatcttctttgatttctttcttcaaagacttgaagttcttatcatacagatctttcacttccttagttagagtcattccaaggtattttatattctttgtgactattgagaagggtgttgtttccctaatttctttctcagactgtctatcctttgtgtacagaaatgccattgacttgtttgaattaattttatatccagctacttcattgaagctgtttatcagtcttaggagttctctggtggaatttttagggtcacttatatatactatcatatcatctgcaaaaagtgatattttgacttcatttttctaatttgtattccatctcttgtattctgttgctgatgctcgcatctatggttccagatttctttcctagggtttctatctccagttttgcctcactttgcgttttctttattgtgtctacttccctttctaggtcttggatggttttattcaattccatcacctatttggtcgtgttttcctgcaattctttaagggatttttgttcttcttctttaaggtcttctacctgtttagcagtgttctcctgtatttctttgagtgagttattaaagtactttttgatgtcctctaccatcatcatgagatatgcttttaaatccaggtctagctttttgggtgtgttggggtgccctggattggacaaggtgggagtgatgggttctgatgatggtgagtggtcttggtttctgttagtaagattcttatgtttactttttgccatctggtaatctctggagttagttgatttagttgtctctggttagagattgtttctctcttgattctgttaacctctatcagcagacctgggagactaactctttcctctgagtttcagtggtcagagcaccactctctgcaggaaagctctcctcttacagggaaggtgcacagatatctggagttcggacctccctcctggccgaagatgaaggcccaaaacaggacctgtcccagaagctgtgttgcttcagcctgttctagaagctgttagcttttgtagtccacactctcacctgtgcagactactctcggcagagtcccagaaccaagatgtctgccaccgatgctcaagcaaagccctccccggcagggcagacacctatcctctggccgggaaggtgcctggatgtctggggcccgaaaaggtggttgccttggaagctctgtggctcccacctgtcccagaagctgatagcttctgtagtgcacactctcacctgtgcagaatactcttagcggagtcccagaaccaagatgtctgccaccgattctcccttattttttttaatagtcccctaaatgcagagggatgttttattttgcccccaaagtaaaataatggtgtaagaaaatctggaatagtcataggggcctgccacaaataactgaagtcacattctgtgatactgtaattgcctcctcttttagtggtaactgagaagaatttaatatttaatgaaatattggttcagtaaatgtctaaactaggctttctgttgctgtgaaaagtcaccatggccatggcactcttttaaggaaacatataattggatttggtgtacaattaaaaggtttagtccattattatcatggtgcaaaagcatgctgccgcacagaaaggtatggtgctgaggagtagctgatagcttatatccagattaggaggcaacacgaagagaaagacactgggcttggcttgaacatctgaaacctcaaagcccaacccttagatacacaccccctccaacaacaccacacctcttcctcctcataacgtcactggctatgggcacctgacagccattttttttcaaaccaccactgcaaacactgttttgtaagttagaaataaagttttaagaggaggtgatatgaattacaagtccatgctattagggtcactaggagtggacttgaaagcattttaaatgacatgagcacattgagaatatggttggcaaatggagatgacaaagtgtttgaaatgtattgcttttagatgcttatatttagcaatatacacaatgctcactcacaagattatttaaacaaaatgcaaacttactaattttttctttttcaaatttatctaggaagaaagtcacagacacaaagagggcatatgtttagcttttgttaaaacaaaatttttaggatgattacatacacaagaaattcttatacagctttaaaacctattttacagaaatcatatcagtgcttttggaaccattttgaaaattttaaggatgattttctgataggcctgcaatgttttgttaccctaggcttctctgtatcatgatttagatgttatggggtcatctatagcatctgtacagacatattgtaagtgtaaaagcaatccttccctgtaactcattactgttttcaatattcctcggtggtgtgggaaacaaactactttgctattgcacataattcataaatgacaatgtgctagaatgccaccttctttatattatctcttggtattcttcaaaaaccaagatagaaatatcacattttaactgtatgtttaattttaaaatatacatagattgggctatttagtaattcagttctgtggaacctatacattgataaatccacataactgcttgtagaaccaagtttcatcagatttctgttattccttcaaattctttgtgttatcacattaaagtgaaattatactaactgaaggaacctttactctctgttaaccacagattacctctatgactatgtatatttcttttcatacaaaagctgatatatagaattaaatagcatagagaatattggaagtgactcctgtcacccagtgttgcttttgaatcagccatgctattacttgttgaatgatgctttccttcttaatgcagcatgccattctactgtcttgataggccacactttacttattggtagaccatttcaatttcttgacatttttaaatgaaacatgtagaaattatctgttactacacaaagcattttgaaaatatattttcaattcatataaggacaacaatctagcaggttattaaaacatatagtgagtatgtggattcttgcattcttatgttaatttgtgtccccagaaaatgttcaggcaagaacatctgaaggcatgagcttctgagaacctgtccccagttggttctgattgataaataaaggtgcctgcagccagtggctgggaaggacagacagaggcaggacttttaggattcctaggctagggatagagagggcaggagaagaggagatccaccaagctgggagagggagaggagagatgccatgcccgagaaggtgtgtgacagagagcatagccgcaatgtaggatccaggagagagcagccctaagggtgcccaactgggtccagggcagccaagatagactataagatttggtaagtaataactcgggattattggtgggaggtggattaactgcatggaggttaggaagtggcccagccattgagttgattaaggcatatcaaaatatagaggctgtgtgtgtgtgtgtgtgtgtgtgtgtgtgtgtcttttattggggaacccagaacattgggtcaggtagcatgggacctgccattgggatttatttaaccattttactactatacaagtaagtatttgtttataaaaaatgccaaaatatatcgtagaatggttacataatcttgtagttccatcaccaatatatgagaattctagttgctttatattcacagatgcatttagaatttcttactactgttgcttgtttatttgatcattgccatattcattttagaagttaggaaacatgtagtaatatttttctaacacctgcctatcactgcaccaaaatacatgtattaatatagcaatataatatttacttttaaaatgattttttcagattctagatgatattgatagaagaatggctatgagataggatagagaaatagattaaacaaataaaagctactgaatgtaattcaagaaaaccaagggtcttctgcatcagtttatctttatatgacatatgtgtatctaaactattttaacaaaggcaaaaaaagttaaataagattagtgaaaatattaaaataaatttgactgtattgtcacagttggtcaatagagataatgtctaagatagatctaatttcctaaacaattttctttgctttcttgtgtaataatgatgggatggaaaaggtaacctattccacctattccacccattcctcagttacaagttgaaatcagaactgtggtccatgtggagtggctttctgattacttgagcaatattcttagatgcttgcccaagctagttactaaagtcatactatatgatcttagagtttatgatcagttcagttacccttttgtgtgtggggattttagatagcttagtggtttaggtgagcattataatatttgcaaataatgcataatatctactgcatgacattcaccatgctatatacttaatcttcatgttaaagctatagtaataaaaatcacatgctattggcataaaaacaggcatattgatgaatggactcaaactgaagacctagacataaatccacaagcttgtggacacctatgttttaataaagaacccataaatacacactgtataaaagacagcatcttcaacaaataatgatggtcagactgggagtctgtgtgcagaagaatgtaaatataattatcaccctgcccaaaactgaactccaaagggagcaaaggcctcaccataaaaccagtcacactgaaactgatagaagagaaactggagaatagcctcgaactcgtacacaaaggagaagcctttctgaacagaacagcagtagtggaggtgctaagatcacagttaatatatggcacctcacaaaactgaaaagcttctacaagacaaaggacccagttattcagacaaagcagcagcctgcagaattggaaaaagattttgttccaatttcacatccaatatgtattcattcatattccatattcatccatatatccacattcaaaatatataaggaattcaaggaacaatataaaaaataaaataatctaattaaaaatggagttcaggtctaagcagaaaaatgtcagtagagagaactacagttgggaatcacttacagaaagaaatgttcaacatcttcagccaccagagagatgcaaatcaaaaccactttgagattccatctcacacaaaccaaacccaaaccaaatcaaaccaaacaattcaaattaatatttcatttcaaatcaatctacaatgggagtacaagagatattaataacaaatctacaaatatttgcttatttgtggatataaattcttgttcacactttatttgtaatgtttgtgtgattaccgtttgcatttgtataaactaattatcttggagattgtttagatgtttttaaagtaatggcttttagacagcaaacaaacaaaaaatcatgaagttgatacttttacatgatgtagacagcgaagctgaatactagacaatgttttagttgcatacattcatcaagtgccatgtcacagactacgactcaaatctagacaagttgacaattctgcagtgtcacatgcctcttatgagatgcaacttctacttcagctgaccttgttgatcttctcctcatctatggtcacattatagtctttgctaacaatcatggcctctttgctgttttagtattacaaagaaattaatatgtgaaaacttcaactttgatatacagattcatttgtcctcataatgttcatacagagaggtcaagtgagtatttgtctacacaggtgcccaaaagagacctagaaagactgtgctttcttgaagataatatgagtaaaaacccataaagctaagtctgatataagaagaggctttgttgactccattgtgtctcttccctcattgtggtgcttttagccaaaagtttctccaaagaacctgcttttccttcagtctgtcatgtacctgtctgccttcccccatgacacacttagccaaatcactttagcaaagtcagataccattcaaccttcataaaaaaaacatgaccagacagtggtgggagctcattttctttcacttactgtttattcttgtagtcttggccacattttcttcttttcatttactctgatcttagtctggcctttccatgtattgtgagagattggcttgattatttctaattagttctatttttatttggaaaaggttccagatgaataaataccaagaagtagaagtctatgattgtaatatgggccagacacattgttattcagttttatattcctaaaaatttttttacacttaatggcttttgtctttgtcagtttatcccaaacaaataataatcactgtttatggctaaacatacaatttagcatttatttcagaatgagatataactttcaaaacattatcagattttaaaatgtgatttaacttctagaagacggctgattagcagttgatatgttctttttctgctttagtggagtcccttgactgcttatgctgactggataatctgatgtaaagacaggaaaggggtagtaaaaaataagctgtgaaaatgtaccagaagtaaagaagtcaaacaagcaacaaggagaaagtagtcgttagtcagtgtctgcaaaagagttcaaatgagatgctttttgactccaaagaccctcagcatgctatcttgagtacaggaagtactctgagatttggttggcttaatttatgagtcagctcttcctttaatagattaattctatttagcattgttctccaaggttctggtcagactacatgcaatgagttttcataatttatcagaagctcagaagaagcacaaagcatactctagctctgagaaataaagaaaaaaacccaataatttgtaatttctagcattctcagacctatgaatttataacagtgaaaatggatctgatgttgtcctgatggaaactcagttctgcacatcgcttcacaggatctggcttgatgattagaattttgtgagagattacaatccttgcttccatgatacactctgcaactgatgaaaaaatatcctaccttttgttcagtatgagataattaatgcagaatgtgaaagtgtaccttctgttgtagtgtgtgtgacctctgaatcgtggagaggtcagacaaagacatcttagatgataccagctggattctagctgtaatagatatttatgtttgtcttcatatctttcacagtagagtcagttattattttctgttatataattattttccattgtgtgatgtgctttgtccctctgatagttgtaaatccagtgttttgaatgaactatttgtattccttgaaattatttttttatttccttacaaaactgctctatctttagttcttactcaaattctttctgttttcaatgctgccttcatagttccttgtttcttttccaggccaataagcatgtaaggaaaatgtaaaaaaaaaaaaaaaaaaaaaaaaaaaaaaaatgccccaaggtgtggttttttttttttccttcaagagatttgactttcttgggattagttcctctcatacctatagcttttgtaaacttggcacaaacctaaacacacctgggaagaaaatatctcagttgaggaattgcctgcctaagattggcatttggacagtttgtttttttccttttttaaattctgtagttccatgtctgatgtcaaagggctttaatggctgaagccttcaagctttgctgactcagcacaattctttctctcaggctagctccactctttctttttttctttttctttttctttttttcagccctcctcagcagatattccacagctctggaccttctaacttctggatgtctccaatgtaacccaagcatcactttcacagacataatggtctctcagggactctatgtaaagcagcgactctgtggctacccttaaccatggatgaagactccacggtctctttaatcatctgtccttcatgactctacagttagaaccatgtgtccatttatgccaagtttatctgtccctttgggatgaatattggtacccttcttgaattatgtttgtacaacatttccttttgccccacttgctctttttcattgtagacccacataagagtgatttctaataactgcatgacagagtcaataatactaacgtgaaatctcctctgctaagaaaattagcctaaaattcttcaatttagtattgggaagattcctaggaaaatggctgtacccagctatattctttgccaaaagattataaaaatggtttctattgaagaagcaatcactgtgcctgcatgggtctgtgctaagtcctctgcaaacatgatgtggttgtttaacttggactttgggggggggggtgtggtaagactcctcacagtgggagtaggagatctcatttgcctactcttaggatcccttttttccctccttcattgcctcatccaactggttatccaataccaaatggtcatttctgaaaacataatcatacagttaacatgatactgactaagaagattgtgtttatatgtttaggaatgtatacatacatacatgcgtacatacacatacagcatgttttcacatgtaaaaacagttagaggaaatgtgatcataatcatttagtattatgcttcattcatccctagtggtcagcattctgcatgataccagaggagaaagattaatcacaaagatcacccatctataaacctgggactccatcagggacctgcctgaaaggtatattggtatgatagtggcacaaatattatggaagttatcagccactttctgattggatttaagatccattccatgaaatggaacctatacttgaaactgatgctacataagttataagcctacaggaaatcctactatcattattatgataaacaaacagtaataaaatgactcctagtgatacattgctatactcatagatcagtgaatcactcaatcagagaagcttcttggagtagaggggaattagctcagagactcagaactgtacaatgtatagaggctgagagatctcaatcgtaggtcagatgtctttgtcaaacccctatgctggagggatctatgctggagaggaaggaaaggattagaagggctagaggtgatggataactcaaagaaactggtgtctttgagacacagcaggactgatgcacctatgaactcatcatgtgtgaaagctgcacaggttcaagctaactggggttcagcactgagagggggaagaagacatgggttcctgcttgtaactgagaagtggtttgcaatggatacctactgagaaagggaaaatctgttttcttctggagtgacattgggtatatcaaacacactccaagcaagccctatactcaaaagtagttggcaagcataaaacaaacttgatccttatcnnnnnnnnnnnnnnnnnnnnnnnnnnnnnnnnnnnnnnnnnnnnnnnnnnnnnnnnnnnnnnnnnnnnnnnnnnnnnnnnnnnnnnnnnnnnnnnnnnnnnnnnnnnnnnnnnnnnnnnnnnnnnnnnnnnnnnnnnnnnnnnnnnnnnnnnnnnnnnnnnnnnnnnnnnnnnnnnnnnnnnnnnnnnnnnnnnnnnnnnnnnnnnnnnnnnnnnnnnnnnnnnnnnnnnnnnnnnnnnnnnnnnnnnnnnnnnnnnnnnnnnnnnnnnnnnncccttcccttccctctcctcccctctccccttcccttcccttttcttttcctttctcttacagaccatttatttgatttcctttttgttttggcacctttggtcttattggtttgttttgcttttcacttttgtagttctttcatttgaaggaaagagaaagaacataaagttgtgtgggtagggaggtggggaggattgagaggagttttagggaagagaaagcattattgaaatatgtcatgtgagaaaaaaattacaattacatcatttcccctttccttttctccctccaatttctcccatgtatcccctcttctgcttgctctgaaatttgtgacctctttttctttaattgttgagacatatttttatttatatattcataaaagaaaaagacactctgctgagtctgtgtaatgatacttctatgtatatgacttcagggatggctttagtggctagccaattctcagtcatatgttgctcctaactccaaatcttcagatatgtctataacctgggattatagtaaggttaaccaggaaggtaaaatcgaatgaaggtgaatggaaaagagtgtatgcgagaacaccagggtacaaacaatatggaagtgaaatggagaagataggagaaggcttaaataagtaaggagaggggtcactataggagacagaggaaaaggataaaacaaaagtaagaatgtctacgtaggagtcatcattatcctttggaaatgttaacagatattttattgattctgtaagaatttcatatactgtatttttatcatgttaaaatttcttcaagtgcttgcatttccaccatttcctgaaaggtgaccatgcaaaaatgattatggaacacctaaactcattttatcaattcttgttttatataagctgtgtatctgtgatctcatgtcttcaaagaatcaaaagatacattttgtcaaactctagcagtccagtaggagaaattagtattgttttgtcagcttatttcagtcaaatgacaaaaatcttaaatagatttattggaaaaaattttagtgtcatttgtctcagtagattttgtaacaagccaaactaattaactggttagagtttttagtttttttttttttttttaacatgttctagagtctcctttggtaggggtaataagatgccatgtgtagtttaagaagcaggcatttatttttttacagttctgggtactagtatatccaaatgggtgctagaaggtttggttttgaatgaaggtccacttgctggcttgcaaatcaccatcatctctttcacattggatttgctcagatgaccttttgctcagagagggaaatagaagggaagagggatgggggcgggggagagcagggtgtttatatgcaggttcctcttgtaaggacactaactaatcttctataatggcccatactcacagcctcatgtaagcctcattatttctcagagtactcatgtccaacatgctttggttgagagttgaggtttcaaccagcctacgaatggatgggatgacagacactcagtctagaatggtagattctgtggtccagtttcacagtttgcttcagaatcaaggttcatgcaatctcagcaagaatcttggtcaccaagacttacaagaaaataaggttggaaaactcagactcaagtgactcaagcagattttccactgaagttttcctcagagccttgaatgtgcacataattctaaattacccatgggaagatttaataaacatgtaagacatttttcatgccatgcttaataatgtttcccacttgcatatttcacagaaaacaatgtagaaaatattcatattgacccgtgaaaattttgtgtacatatgtaaacacattttatatattagaatttattatatgcatattatgatcacctagaaaattatttttacatttatgtgtgttatatttcatgtctgtcattaacatagaaatagcataatattatgagcaagaaagctactgagattgtttttgagtcaatgttgagcaaatatggagcaatagaatatcagatggaagaagtttttatgaaatatagaattatatactttctagacattttaagcttctgtcaagctaaattttaaatggaatttttctctcttgctgaaatatttatatatatatgaaggatgtatatcttcaacaaagtgtggatggttcatgctcattgtttgaattttattcacagatgtctcattatcacagtagaggaatcaggctacatgtacacaatgaagtggtttcttgagatctcttagctaactgtgactacaaacagagctagaatacagcttcctatctcttacattagtgttgccctgctgccgtggtgtgtcaccttttttagtcctcccaattcttctttttaaatgagaaattcacattcatcagagacacatggctttaaaaattgcattaagagctagcaagatgattcagaggtgaagatgccaagcctgagggccagagttcaaacaccagaacctacgtgctttaagaagaaaaagactcctccgacctgtttcctgacctccacatgagtgtcctggatgtagatagaaacacacacacacacacacacacacacacacacaccacagtcacacatacatgtacacatgcacccatggataaaaataatgaataaataaatacatgggagagggataaggaactttcagaaaggaaactaggaaaggggatcacatttgaaatgtaaatgaagaaaatatataataaaaattaacattaaaaatacatgaataaccaagttaacataaaatattttaaaagtaaaatacataaataaaagtgcattagatgtgcccttcaaatggatgacattattaacacttatcacagggaatagccttcttctcactggctcttaatcctagggaagttcatgactcgcggctaaaaaataaaataattttcattagcaaagcattgttcattgagaaacaacacacctgaaatgtttatttttcaatttaaaaattaaagagaaaccttaagtgatttgagagcagttatccacaacagagggataaagaatccaggccctggcccttggggcataggcttctaacacattagccagtatggagatgactcagggtggtgagtcagacccctttccaaggattctaatgaggatatcaggaccatggaggaaagcagccgttgtttagagcatccatttctcatctaggtgctcaagtgcatgaggatattgtacgtattgttctccagtggaaagaatgcctttgtccttatcaagggttgatgagttatcctgacaaaattacagaggagtcacacgtacaattctgtgacattgctgtcccttgctcttcctgcttggagagattatatgagctcagaaatctaattgcccttcggtgatgaggcaagatgagagcaagctgagagcatggagatttctttctataaactgggtctgacagtgcctgctgaaggatggtgcctacccgagagccatggaggtttcaccattgtcatgttgaagaaatttcccatggctttggctctctgaataaagatggaggagtgcctttccagctttttgaccactatattcatctaatctgggaaacttgtcccgatgcgatatgctgaatttaactgttgtagctagcgggttcctttcagtgggaattaaagctgcaaattgagaaggaacaagtccgttttgtgtgggtgaagtgtacacaacgtggaaacagttaccaggcacttgggtttggtgtgtgctgacgcgggggcccagattacagagtattggtgcacggagctggaaaatgtgggcgatactttcttgtttgctaagaagctggttgcatagctaactggtacagagaggagctttgggggatgcaaaccagtcaggtggtatttgtccattttgagtttacttttcttgtggttggaatgagggatgactgtgtttatttcaatcagatccatctggggctgactttggctggaaggccacagcaatgggaaagaatgatgggaatgagaaaacttgccctgcaaagataaagtggagctgggaacttgaaaatgcctctcctgcagccatcttaaccctgaagaaagccttgaaggacaaatggcagaggatagcatggaagttggaatctgcaatgaaggtgaatttaggaggcctcctctgaccgattttgagaatgtcacagcataataaagtagctgaacaactctacttacagataatgtacatacttacacacgtttactaggtttcatttttgcaggctttttcatacttgttttcacaagatctaatggtcttctgtttaaataatataatatataatcatcatcatcattatcatcatcatccaatctctaagtgtttttttttatttatttatttattttatttatttatttatttatttatttatttatttatttatttatttatttatttattgtgtatgtctgtgtaccgtgtccatgcctgatgtcatggaggtgagaagatcttccagcactttggtgggtataaaacccagatcctctgcaagggttggaagtgcgcctattgctgagccaactcgtcagctttgagtaagaaacgtttaaacttgtcatttctcactttttaaaaatcacttttgatttcttggaattacattgcaaagcagaatgacaaaaatcagcctagttttcatatattttatatttattgctagctaatggctatcctatgtccacataaagcaaactgttgctttcaatgcctttagaacagagagaatcacaggtattgatgaattcatgagacaaggaaggatcttaggtattgtagaggtttaataagaatggccctgtaggctcctatatttggatgattaattacgagcaagtggcactccttgagaatgatgtggaagtgtggctttcttggacattgtatgacagtggaggtggtctttaagggtaaacaattccaaaccaggcccagtgtctcattccttttcctcttccctgtggatatagatgtagaactctaagctatttgtccagcaacatgtctttctgcacattgccctgctttccaccacaataacgagggactaaacttctgaaactgcaagcaggccctgattaaattctttcttttataagagctgtctttgatcatggtctctttcaaagcaatagaacactgactaagacagatattaagtacctttcgatgtagatctgggagagtctagagtacactctatgagcaccacatactataacaaggaagtgttagacaaaattagtctcccttaggagatatgcaagttaataaagtgtggtttgctgataaaatgaaaaataaaaaaaaaaaacaacaaaaaatactcctctcattagtaaatagctaaggaatccttccttccaaatctggttatctgacactcaccagtaaatatcaagttttgactaacaggaatgtatctgatatggtatatatcattctatgttagcatatactaattaagtatatttttaggtttattgtactagtttgcattaactgtcagcttgaccaaatgtacactcgcttgaggaggagtctcagttgaataattatcttcctcaggtcggtctatgtgcatgtttgtaaagacttgtcttgattgtctactactgtgcgagggtccagtccactgtgggcggaactgttcactgagcaggtggttctggattgtagaagaaagctaggtaaatatgactctatgagcaagccggcaagcaagcagccttcctccatgcttcctacctacatgtttctgtcccaacttctttcaatgattgattgtgaccaggaagcataatgaaaatgaatgttcttccatgagttgtttttttatcagaacatgttttattacagcaacagaaaccaaactagaacacttagattaaattagttaaatactgctgttctcctattaaagtctctgttgtgtcttgtcttgctttctatttcatcagtgatttattttcagtcaacagactcatttttcaacctttatatcctgggttcactattcaatttagtgatcttatgaaatcctgatataattttgtacctaaagttgtgcttatcatacactaatattcataacctcattgcttaaatattataggtaagtagatatggtttccatttatttatgtatttattttcaacaatattttgggcaaaaaatgtatttatatatgtggtgaagtataatgaacaatcaaatatgcaaaatcctgttttcaccatttttaaatgtcggtacatagtattaaatttatttttgttaagtacacataactctaacaattttatagtttgaagcagcaatattttgcctcataaatacctgacacatgaaagatttaaggcatgtatatgcagcccattgcaatagctgttagagtttgagcaataatgcctttgaggtgatctattaacagcaaggcatgaaattattgaactgatggctacaataaatgacagcaccaacaattagaaattcatttccttttattttgatgcatatgatttaaaaatcaaggtgctcttgttaggagtatatatctcagtatattgatttatattttgattaggctacatgtatatactctggaaatgattaggatacattgatttaagcccaatctgcctaaaactctgaaagtgaaatttaatagcttaaatggatcatgctagaacaactgtataccatcatattgcacaagtgaatattacagaacattctcaccaatgctaatgccacattctctattcctcatgagtacagattcatattcaatcagaatagtcattgttactcaaagtagaaaacgtggagagatgagacagacatataaacagacttagcgaaagggactagaagatagctcagttgagaaagcacttgccatgtaagcgtggacatttaatcctcagcaacacagaatgagaactggtgtaatggtgaatccttataacccaaaggtcaatgctgctctaggttcaatgagagactttgtctcaaaatagaaggtgaatagcaagtgaaggagacccctgatgttgactctggccttagaaccttcatgcacatagatggacagaggacatgcatgatgtttggataaagtcagaagtcaggggataagctacagttaaaagaaagcagagaatcatacaaggaaatgtacaagaacacttatgaaactgagaaaaagatgcaaagatttgatgctgagaaagatggaggaaaagggacatgagtgacatgtcactgtaggggagctgatgagcctggcaacaaagataatcaactttgtcttgtgagatggtccaatactgatcagctgttatgaggctaagcatgtttacagactcaatgttctgcataaaggtgggggttccatggcctggttctaatgaggatcctgctctagggtgattgacttatccttaggttccattgcacttctatataaatggtatacaatttgctatccccaatactctgtgatataactaaactgagctttaacttccttacaaccagaggatgcaaaaggaactagattccttaagacgtgagcacacttcctggtgtgcatgtttatatgctttgggtaggggaagggctgttcttaccttgggtagtctcacatttttgaaaacttacataaataaaagagctgtgtttcaactagagcttttgtttatccgaatgcctctaccacattataaactgcagcatttcatttaaaccattgatttgtatttgccgtgcagaaaataaactattcagtttacttctgtcaattctaataataaccctaatgctatgcttgccaaaacctctattaaagacatatgccttgactcacagattcctataataggggaaaacaactattcccagcagctggaggttaaatgttgcttttgaagagaaagaggagaaatatcccacccaaatatttatatagcttgggatatctaagagaccctcagtagctggcaggactctgttaatccagttgaaggtctggccccaactgcagacctgcatctagctggtgaaataacaaaaggcacatgtcctggtcacgatggtgtggggttattgacaagctgcttcttcactcctatatcaactttcagttatgtaaagctgagaaagatgagtgttttaggggctttatctactgggttctacttcctggactgagagcttctgggagacacaagataccctcccaactcttgcaccttgactacagaagactcaaacataaattctgaactgagttgtttcccctttatagcctctctgaattttcactctgttttcagagtgtgaaatgggagaataatctgatggtgccttggtgctgttttaaccacagaggcaaattccagacctattccctctcatccagagattaattaattaatcaaagccacaagtcccaataaaaatgcaagctagctcaaaaccaagacctttttccccctaacactacttaacagatggcattgcacatatactcatatcaatgacaaatagcacgaaaatagcaaacaaatattgactgagcattcatgatcttcatcccctattgcatgcaggctattgacgtaggttgtccagtgaaactgaaagttttcatgaatggctgtgcatccccattgcttacattctttctggaatttgaatatacaaagacataaattcttgaaagagtaggaaatgaaatagtctgtgcaagtcttgtctaacaactctaaattttgaatcagtgcatgtgtgtgtgtgtgtgtgtgtgtgtgtgtgtgtgtgtgagtgtgtgtgtgtatacatgttataaagaagtgctgaaacctgcaatggaatttagatgcagcaattttaaggttttaggtacaagcaaccatgatggttcttgttttgccatattcactattataaaaaccactctgcagcgaacgtcacagcacaatatggctttcactatgtatctaattaataactatgtgattctgatagcttatctggagataagctatgtgtgttcttgtgagaccaggctgacgtactgtggttgtttgagagcatgttcactcagaaaggagtaacctttagagatgaatttttcagaactattatttatcctcctgaatggaaaagtcaccaccactacaagtaaaatgtgcagttttggaccttccactgaatctggaaatgtcagagcaaatggagaacagttaggaaaggaagtacagtaccctcaatggggtatgatgcagatgcagcaggctgttcctggttgtgattcataagaaatgcactcaaagccatttgatgctgtgcagttaattccttgattgaaaaaagggcacctcagtgttgatctaggactctcaatgtttagtgaaaaatccaaccattttcttccatcatcaaaatccttttcattataatccctttttggaacaactaaaaaccaaaacgctctcctctggcattacaatgaaggaaagaacattaaatacttggtaaggatgttttgaaatcaaagaagatcatttcttctacagaacttggtaaatagtttctcttcttaatgatgatgctgtctctcagacatcttcaaaccaagcaactatgacagatttgttttgaattaacacattaattggagtgaataaaatatctcttctatgatgttaaccttgtccagcacttccctaattcttgtatgaccactgtaaaaaatggacccaattataactcttttgataggataattttctctattttagccttttaaaaactctcttctatgtccagccattcccatccactcttctcaccattttgatgatgctgaaaacctatcacagatgcccacatgttcacatcttgagtctaagaactccaaaagaagaggaggaggaaagaggaaaaagaagaagaagaagaagaagaagaagaagaagaagaagaagaagaagaagaagaagaagaagaagaagaagaagaagaagaaagtggaggaggaggaagagaaggagaaggaagagaaagaaagagaagaaagaaagaaagaaagaaagaaagaaagaaggagaaggagaggaagaagaagaaggttaatactcatagcgtacttatatgttagacacaggattaactggtgcatatgcgtaatcccctttgatcaactagttgtgagtcaacctcttgaatgattgtatttcagggatcctttatgaattgtagcatggaggataggtggtcttgtcatcatcccaggagaaggaaagtaagttcaatgctatcacagatatccttagagttgtacagatagcaaaacttgtctgccagttagattctaaaagcagtgttttctcatagcacatttccaaaaagatctgtttcttttcagcaactaaatatttttccaataatatttaatcaagaatcatggggcatgagactgaagcctatagattaaggataaaattatttgtaaaacaacattgtcctttggtgtttttagagcttgcttattcagagaggggagactctcatttgtcaaataattatgaaaatacaaaataaaatcaatctggaataagtagtaagaggggtaattttaatattctgtgagagaatctaataagtagttgaatctttgtgcagaggggacaaggatgctataagataaattttgcccaaaagaaaaagctaattaatttgagaataaaacatgaattacaattaactggacaaaggatagtttctgggctaagacacccaacatcctcattgactctgagttgtataggggctaccgtatcatgtagaatactgctggttttgtttcacaaattggtaaaagattccaacatagactggtctagcaagtgcaaaattgtgctttaaatatttttctcgcccttctggtcagcgttaccaccaggttaccttggatgtggagtcggtggacacccccaagatccctagaggactctccacatgatcttaggacctctggtgagtagaacacaacttctgttccaatctaatcgcatggtagctgagacagcattagggaagaagaaaactggcctgaccagggtcacaagtcccttccagttggctccagcacctggtcaccttgtgcgcagagttggcggatgcccccatggtccctagatgactctccacacaatcttaggaccgctgaccagacagctttactgtcctcaaaggacacaccatttccaggcactgtaacacacccaggatctttgacaacagggtcccaggataaaaggagcttggtcacaccagtatttcagggtcacagaggaacttcactgccaagaactctgacacactcagaatctcaggatcacaggatcccacaatcaaaggatcacagagaaagctggactctgaggagtcctgaatcaactgggattataggaaggacaagctccaatcagttatattgagggcagcaaaaacgtgagataatcagatggcaggaggcaagtgtaagaacaaaagcaacagaaaccaaggtaacttgccatcatcaaaacaaaactctcctaccataacaagtcctggatacaccatcacaccagaaaagcaagacatggatctaaattcacttcttatgatgatgatggaggactttaagaaggagatacaggaaaacacaggtaaacagctagaagtctttaaagaggaaacataaaaatgccttagagagttacaggaaaacaataccaaacaggagatgtaattgaacaaaatcatccaggatgtaaaaatggaaggggaaacaataaagaaaacccaaagggagataactctggaaatagaaaccctaggaaagaaatcaggaaccatagatgcgagcatcagcaacagaatacaagagatggaagagagaatctcaggtgcagaagattccatagggaacatggacaacaataaaagaaaatgcaagatgaaaaaagatcctaagtcaaaacatccaggaaatccaggacacaatgagaagaccaaacctacggataataggagtagatgagaataaagatttaaaatgtaaagggccagcaaatatcttcaacaaaattatagaagaaaactttccatacctaaagaaagagttgcccatgaacatacaagaagcctacagaactccaaatagactgaatgagaaaagaaattcctgctgacacataataatcagaacaacaaatgcactaaaaaaagacaaaatattaaaagcagcaaggcaaaaaggtcaagtaaaatataaaggcagatgtatcagaattactccagacttcttaccagagaccatgaaagtcagaagatcctggacagatgttatacagacactaagagaacacaaatgccagcccaggctattatacccagggaaactctcaattaccatatatggagaaaccaaagtattccatgacaaaaccaaattcacacaatatctttccacgaatccagtacttcaaaagataataacagaaaaaaacaaaacaaaacaatacaatacaaggatggaaactatgccctagaaaaagcaagaaagtaatccttcaacaaacctaaaggaagacagccacaagaacagaatcccttaacaacaaaaatataggaagcaacaattacttttccttaatgtctcttaatatcaatgggctcaatttcccaataaaaagacatagactatcagactggctacacaaacaggacccaacattttgctgtgtacagaaaaccaatctcagggaaaaagacagacactacctcagaatgaatggctggaaaacaatttttcaagcaaactgtctgaagaaacaagctggagtagccattctaatatcgaataaaatcgacttccaatgcaaacatatcaaaaaagacaaggagaggcacttcatactcatcaaaggtaaaatcttccaagaggaactctcaattctgaatatctatgctccaaatgcaaggccagccacattcattaaagaaactttagtaaagctcaaagcacacattgcacctcacacaataatagtgggagacttcaacaccccactttcaccaatggaccgattgtggaaacagaaattaaacagacacacattgaaactagcagaagtaatgaaacaaatggatttaacagatatctatacaacattttatcctaaaacaaaaggatataccttcttctcagcaactcatggtaccttctccaaaactgaccatataattggtcatgaaacaggactcaacagatacaaaaatattgaaattgtctcatgcatcctatcagatcaccatggactaagggtgatcttcaataacaacatatataatacaaagccaacattcatgtggaaactgatcaatactctcttcaatgataccttggtcaaggaaggattaaaaaaagaaattaaagactttatagagtttaatgaaatgaagccacaacatacccaaacttatgggacacagtgaaaacatttctaagaggaaaactcagctccgagtgcctccaaaaagaaactagaaagagtacacactagcagcttgacaacatacctaaaaactctagaacaaaaggaagcaaattcacccaagaggagaagacagcaggaaataatcaaactcaggggcaaaatcaacctagtggaaacaagaactattcaaagaatcaaccaaatgaggagctggttctttgagaaaatcaacatgatagataaacccttagccaaattcactagagggcagaggaaatgcatcctaattaacaaaattagaaatgaaaagggagacataacaatagatcctgaagaaattcaaaacaccatcagatccttctacaaaaggctatactcaacaaaactggagaacctgggtgaaatggacaaatttctagacagatactaggtatcaaagttaaatcatgatcagattaatgacccaaacagtcctatatcccctaaagaaatagaagcagtcattaatagtctcccaaccaaaaaaagcccaggaccagatgggtttagtgcagagttctatcagaccttcaaagaagatctaattctagttcttctcaaactattccacaaaatagaaacagaaggtactctacccaattcattctatgaagccttaatttctctgatacccaaatcacagaaagacccaacaaatatagagaacttcagaccaatttcccttatgaatatctatgcagaaatactcaatgaaattctcactaaccgaatccaagaacacatcaaaacaatcatccatcctgaccaagtaggtttcattccaaggatgcagggatggtttaatatacgcaaatccatcaacataatccactatataaacaaacacaaagacaaaaaccacatgatcatctcattagatgctgagaaagcatttgacaaaatccaatagccattcatgataaaagtcttggaaagatcaggaattcaaggcccatacctaaacatgataaaagcaatctacagcaaaccagtagccaacatcacagtaaatggtgagaagcttaaagcaatcctactaaaatcagggactagacaaggctgccccctttctccctacctgttcaatatagtacttaaagtcctagccagagcaattcgacaacaaaaggagaacaaggggatacaaattggaaaggaagaaatctaaatatcactttttgcagatgatatgatagtatatattagtgaccctaaaaattccaccagagaactcctaaacctgataaatagcttcagtgaagtagctgtatataaaattaactcaaacaagtcaatggcctttctctacacaaaggataagcaggctgagaaagaaattagggaaacaacacccttcacaatagtcagaagtaataaaaaatacccttggtatctagctaaggaagtggaaaggatctgtatgataagaacttcaagtctctgaagaaagaaatcaaagaagatctcagaagataaaaagatctcccattctcatgggttggcaggatcaatatagtaaaaatggctatcttgccaaaagccatctacagattcaacacaagcctcataaaaattccaactcaatttttcaacgatgtagaaagggcaatttgcaaattcatctagaataaaaaaacaaaacaaaaaaaaaaacctaggatagcaaaaactcttctcaaggataaaagaacctctggtgaaatcaccatgcgtgacctaaagctgtactacagagcaattgtgattaaaaactgcacggtactggtatagcgacagtcaagtagaccaatggaatagaattgaagacccagaaatgaacccacacacctatggtcatttgatctttgacaagggagctaaaatcatccagtggaaaaaagacagcattttcaacaagtggtgcgggcacaactgctggttaccatgtagaagaatgtgaattgattcattctcatctccttttactgaggtcaaatctaagtggattaaggaattccatgtaaaaccagagacactgaaacttatagaggagaaagtgggcaatagcctcaaagatatgggcacagggaacaaattcctgaatagaacaacaatggattgtggtgtaggatcaaaaatcgacaaatgggacctcataaaattgcaaagcttctgtaaggcaaaagacaccgtcagtaagacaaaaaggccaccaacagattgggaaaggatctttaccaatcctaaatcagataagggactaatatccaatatatataaagaactcaagaaggtagactccagaaaatgaaataaccccattaaaaaatggggctcagagctaaacaaagaattctcacctgaggaatacctaatggttgagaagcacctgaaaaaatgttcagcatccttaatcatcagggaaatgcaaatcaaaacaaccctgagattccacctcacaccactcagaatggctaagatcaaaaattcaggcgacagcagatgctggtgagaatgtggaaaaagaggaacactcctccatttttggtgggattgcaagcttgtacaaccactctggaaatcagtctggcggttcctttgaaaattggacatagtactaccgaaggatccagcaatacctctcctgggcatatatccagaagatgttccaactggtaagaaggacacatgctccactatgttcatagcagccttatttataatagccagaagctggagagaacccagatgtccctcaacagaagaatgaatacagaaaatgtggtacatttacacaatggagtactactcagctattaaaaacaatgaatttatgaaattcgtaggcaaatggaagggcctggaaggtatcatcctgagtgaggtaacacattcacgaaagaactcacttgatatgtactcactgatgagtggatattagcccagaaacagaatacccaagatacaagttgcaaaacacatgaaactcaagaagaacgaagaccaaagtgtggtcactttgccccttcttagaatggggaacaaaatagtcatggaaggagttacagagacaatgtttggaactgagatgaaaggatggaccatctagagactgctgtattcgggcatccatcccacaatcagcctccaaactcagataccactgcatatgccagcaatatttttctgaaaggaccctgatgtagctgtctcttgtgagactatgcgagtgcctggcaaacacagaagtggatgctcacagtcagctattggatggatcacagggcccccaatggaggagctagagaaagtacccaaggagctaaaggggtctgcaaccctataggtggcacaacaatatgaactaaccagtaccctcagagctcgtgtgtctagctgcatacgtagcagaagatggcccagtcggccatcattgggaagagaggcccattggtcttgcaaactttatatgccccaatatgaggaacaccagggccaaaaattgggagtgggtgnnnnnnnnnnnnnnnnnnnnnnnnnnnnnnnnnnnnnnnnnnnnnnnnnnnnnnnnnnnnnnnnnnnnnnnnnnnnnnnnnnnnnnnnnnnnnnnnnnnaaaatacctaattaaaaaaaatgtagcaaaaaaaaaaagaaaatatcaaataaaaataaaaagagaaaaaatatttttctcatttcttagtaactctgaaaagctattgcaggctacatcactgtagtgagaaaaaagacaagttattctttgaaaaatctcatttggtttgttattggaaaactagagaagaggaagaaaaaatggtttcattgaagtcagagaaagatatttcagagcaacatacagataggttgctaacactatataggattttgtaactggatgcagaatttgtaaaaaaaaatctggacagagtaaaggattatggacatgcaaagactgagatgaacgtaaagtataacttgaagtcagtgatatgagtctgatgtgtttctggcagtgctacacatgtctcattgagcaacttcactgcagccttggttctcagcaatgacatgagtgcttcaaactgcagagaccatgccacccagtgccactgaatgctacctaaaaaccctgagctcaaattcaagactattgaatgctatgtatgaactacagtgattttactgtgcaaatgcttctgtgctgatagaaacataatggtttgtttatggtaacttgaatgtgaaagacctctgagcaatacaggtcgaatgggagttactactgaatatgtgcatctctatcttgtgagaaaatatgcagagtctgtccacattttttttggaagagttaaattttaagtgtctaagaatttggacatcaatcctaatttctatttctttatattatttcttagaaggatttatatatgataactggatctgcctggaataccagaagaggagaagtaactgactaaggaaacccattttcactaattatctaacctactgtctgaagataagaaaaggaagggaaaggattgcatgttaactggggcccttatctcctcctatcctcagctatgtcagtcagactcaagtgtgacttgcaccatgtgtgtttcttgttttctaacctgtagaagatgggttatgggttattgataatcatgtaagacatttcctgcaataaaacttcacttgttctttcttccc

SEQ ID NO: 354 - DNA, 1214 bp, Mus musculus
tagaaaagggtgggatgaagatggcttttacatctctaggacggaggtgttagaagctggatcagggactggatcagaggatcaggggagactttgtgagcatctcacagcccactcaagactatgttcaggatactccataagaagtgctgccttcaccccaggctgctgaaaagcaggtcacaggctagatccatctggggctgactttggctggaaggccacagcaatgggaaagaatgatgggaatgagaaaacttgccctgcaaagataaagtggagctgggaacttgaaaatgcctctcctgcagccatcttaaccctgaagaaagccttgaaggacaaatggcagaggatagcatggaagttggaatctgcaatgaaggtgaatttaggaggcctcctctgaccgattttgagaatgtcacagcataataaagtagctgaacaactctacttacagataatgtacatacttacacacgtttactaggtttcatttttgcaggctttttcatacttgttttcacaagatctaatggtcttctgtttaaataatataatatataatcatcatcatcattatcatcatcatccaatctctaagtgtttttttttatttatttatttattttatttatttatttatttatttatttatttatttatttatttatttatttatttattgtgtatgtctgtgtaccgtgtccatgcctgatgtcatggaggtgagaagatcttccagcactttggtgggtataaaacccagatcctctgcaagggttggaagtgcgcctattgctgagccaactcgtcagctttgacgttaccaccaggttaccttggatgtggagtcggtggacacccccaagatccctagaggactctccacatgatcttaggacctctgaaggatttatatatgataactggatctgcctggaataccagaagaggagaagtaactgactaaggaaacccattttcactaattatctaacctactgtctgaagataagaaaaggaagggaaaggattgcatgttaactggggcccttatctcctcctatcctcagctatgtcagtcagactcaagtgtgacttgcaccatgtgtgtttcttgttttctaacctgtagaagatgggttatgggttattgataatcatgtaagacatttcctgcaataaaacttcacttgttctttcttccc

SEQ ID NO: 355 - protein, 57 aa, Mus musculus
MGKNDGNEKTCPAKIKWSWELENDAAILTLKKALKDKWQRIAWKLESAMKVNLGGLL

SEQ ID NO: 356 - DNA, 883 bp, Mus musculus
atgagctgccaatccacagcacctcctattgtagctagaaaagggtgggatgaagatggcttttacatctctaggacggaggtgttagaagctggatcagggactggatcagaggatcaggggagacaagaaagaattcactatagaggctgagcagtggtgctccaggaacttgtctactgtggggtagattcatgataacctacttaaggcggcagccactagaagaaggaagagtcaacacagaatgcaaagcatggtattttgtttttatttttcaagctacttcatctgggatttaatggactttgtgagcatctcacagcccactcaagactatgttcaggatactccataagaagtgctgccttcaccccaggctgctgaaaagcaggtcacaggctagatccatctggggctgactttggctggaaggccacagcaatgggaaagaatgatgggaatgagaaaacttgccctgcaaagataaagtggagctgggaacttgaaaatgcctctcctgcagccatcttaaccctgaagaaagccttgaaggacaaatggcagaggatagcatggaagttggaatctgcaatgaaggtgagaagatcttccagcactttggtgggtataaaacccagatcctctgcaagggttggaagtgcgcctattgctgagccaactcgtcagctttgagtcggtctatgtgcatgtttgtaaagacttgtcttgattgtctactactgtgcgagggtccagtccactgtgggcggaactgttcactgagcaggtggttctggattgtagaagaaagctagggatcctttatgaattgtagcatggaggataggtggtcttgtcatcatcccaggagaaggaaagt

SEQ ID NO: 357 - protein, 81 aa, Mus musculus
MGKNDGNEKTCPAKIKWSWELENDAAILTLKKALKDKWQRIAWKLESAMKVRRSSSTLVGIKPRSSARVGSAPIAEPTRQL

SEQ ID NO: 358 - DNA, 38374 bp, Mus musculus
  misc_feature (1)...(38374): n = A,T,C or G
atgttagctcggaacacaaagtaaggaatggctgctctggggtgctaaagctagcccaagataaggtaattagcctttggatctgcaacattccagcctctccatggtattgaccaaccagacaatctctgcagacagtcccttttcgggggttctaggtcataaccgcagcactcatagagcttaatgtgtttactctctctctttacagtagccttcattgatccaggctcgggaggactttcttattctactctttctctgtgttactcttctgcaaagccagcatgttgctgtcagtggtaccaagaatctcttctctgctgggggaacgcagggtcacagaggttaactattgtttgagcacaatgctgggctgcggaagtagaaaccccagatttccatatgcaaacgcaatatgcacgcgcccacagagaacaagactccctggtagtttgcattcacgttttcatttccaggtctcagacacatattttcttagcatttgaataaggttcagtctggagaggaaaggactgtgcaggccgaagactggctgccacatttggctccgtctggaatactctggtaggaaagtggtcggtgactgcaaatcgtagtaatgaatactgcggtcaagaaacttggccgttgtcattctccatgagggtgtatgtctgtctagtcctgacaaaggttctctcttcacaactgtgtgagttaaagacttggacacactgtgtaccaaagtaaagcacgttgggcgctgctggattgcttggggcaagagagtgattcaggattttcactgtgcctggcccctcatcttcttcatcagcacggtgattatttgcttaatgttagcatactaacactggaactgtgatctgtgctaaaattaatcttttaaatcacttatcaatgtctgcagagcagagcaactgtgcacaggccagagaagcgagtaacttttaacacaaagatgaattttggccttaatttcacattgatttaattatctgaatgtctgcaagtgacacaattccaccttacttttccctggagaaatgtcattgaattcttaattctttccaaggaggctgtctgggagtgtttgtgaagtccaattcatgattttattgtttgattttcacatggccagctgggctgtgactgtgtactgtgagtgtgtgtgtgtgtgtgtgtgtgtgtgtctgtgtgtgtacactcatcatctcagaatgaaaagactggcttcagttctaaactcagcagcaaaggatggagaaagaacactatgcaagcttcaaatggtaacagccacaaaagaggccttgatttcaatataaaaatcgtggctgaaagattagtaaaagttgtcttagataactcaattctcccacagggagagcagagtctgaaagccaggaacccacagttcactccctgctgacagggaagacacagtcctgggtgacgagtgggaggcgtggccttctggacagaagaagagggctttgtgctgtttatacagaggagtttctcccctacctttcttctccccagtgttccacccccacacccctccttctctttaaccttcttctaattcttctgcacttttttattgtgaagcgtttaaaacacaagaagaaaaaaaaaaaaagagaaaagatcatctcagtcatttatgtttgtccagctagacttagcattgattcacatgtgtctgggatgggtactctccatccttatatacctttctgtgtatgtctttatctccatccatccctttctgactgccgtgttgtctatcttcacattttccttcttaaagtatttttcgaatgagtggcagatcttgggagtctcggctcacaagtacctcaacattcacaccttcaaaatagacatatccctgtacatgctcattacatttaaattaattggcaatcatttctggatattattaagtatttatacttattgggtttatagttaaattattatagtttggatctgggaaattccatcttcttaaaattttctttttttttctggttcaggttttaaagctttttgcaaaaaaaaaaaaaaaaaaaaaccaaccaaccaaccaacccaccccacccacccaaaccaaaccaccccaaaccaaaattaccaacccactagaaatgatgaaatgtattcattattcacgcgtggcttgtagtttctcatccatagttttgtgtatttatttaagttgctattaatttttgctgattctcatccaagtcctggtggtcagtctccccctgtgtgactcctgaattttggatgaatattgctcgtttctttggagattattagagggaattatttgaggtttggtttgaacttaagaagacactgcaggatgtgacttcactcacgttgctgcagagacaacttcaatccagtgctctgcatgtcttggacaacaggagagtggactttggaagggaaaacccatctgaggcctgagggttattttccatttggcactcacacccttgaatagagctgtggtgggattttaggttggttttggtctcctttcgtgcaaggaatgcatcttttttgcctccgaagtgtcggttttagaaaggctcctatttcacagcatggatgtccctggactctattgcaccgctgaagttcattgctaaacgctcagaactcaactgccttctgagtaactcatttctcagatcctcttggttcgggttatgaggagacccaggatgatgctcattctgccagaaagaggtcatccacaactcaaggaagaagatggtcagatttatcatagagaaaagggactgtcaaggcttgtatttgatttccagtcctaaattagcctagaataacgaagatttgatttttctgttctatcaaaagcattaagagtgttttgacatcctctggccaagtgccaaatgctttgggaggaacagaagttttatgttgttcaaatgggctttaaatcaggaggagactaagggaacctcacctagcaactaataatcactaattaacagtagaaaggtttctgcttctgtatttagagcactgagctgttccctgcaagtcagggtctccatatgtagcccaggctgggctgatctcaggagcttcctgccgcagcctccggaattctgggatcatagacaagtggttttcatgtgactttcaggtgacttacttttgtgaccgtcaggatagtctctaggggaaatcagatgtcttatagttgctcgttagaaggaagccaagatgtatagtttgaatcaagttttacaagtgttggaaggtagaaaaacaacactgataaatatttgatttttatgactaggtaataaaaccatatccttctttatatttctttctcagcttggttcactaggaaaatcccaacctttgagttgctatgaatttgttaatgcagacttctaatgcatttttattagagtgattccataatgtagtaggaatgcacagatagaaacagtttactcatcttttctcttgagatgcagagatgccgtgttttttccacagtatctgatggttttaagccacaacatacccaagttcaagcagccgaatttggacacttaggtattttaattctttttttaaattttcttttatgtacactggtgttttgcatgcatgtgcatgtgagggtgtcaggtcccctggaactggagttacagactgttgtgaattgctatgtgggtgctgagaactgcacacaggtcctctggaatggcagtcagtgctcttaactgctgagccgtctctcctgccccttggtattttaattctttttttaaaaatttttttgttggttattttattgatttacatttcaagtgtggtcccccttcctagtttcccctctgaaaactccctaccccaccctccccctgcttctatgagggtgcttccccctcacttcccactccccgccctagcattccctactctggggcatcaaaccttcaaggaccaagggccttccctcccattgatgccagataagaccatcttctgctacatatgcagctggagccatgggtcccttcatatgtattctttggttggtggtttagtccctgggaactctggggatactggttggttgatattgacaaagtcttaaagaattctccaaacatgaatgaagtggaagaggactttttctaaaataacaagttttgtttgtttgtttgtttttgttttgtttttccggataggggtttctctgtggagccttggctgtccttgaactcactctgtagaccaggctggcctagaactcagaaatctgcctgtctctgcttcccaagtgctggaattaaaggcgtgcaccaccactgcctggcttgtttttgttttgaaatgctggtaactgactctatcactttgatcattctgggtaaactctttgattacatcctcaattacagtaccatgatttttctctttctttttctttttctctttctctttctctttctttttccctttctctttctctttctctttctctttctctttctctttctctttctctttctctttctctttctctttctctttctctttctctttctctttctctttctctttctctttctctttctctttctctttctcttctctctctctctctctctctctctctctctctctctctctttctttctttcctgaccacttaaaatcctggtgaaaagatgataggattagcaacctctcccacgtgacttggtgaaagaaaccagggtgatacacagtgatttctgttcctgcaagagacattggctgtagaaatgctttctggtgcctcactaacaatggttggacagcagagatgcaggggagtagaagtgaatgccacatgggataataaggtcaagagagcatctgtgtttccggcctgcttcaaagcacccgggccccacgtctaatagcgggaaatccatctttgtgtactggagatgaacttgccctgtggcctggcattaggaagcactcggtatcaagatgtacaaacgcctatgtcaccattaatcacctgtccgtgctttcctttctatatcctgtctcagcttgggcagagccctcagttcaattgtacctgcggaatattctgttaaaaaattcaaccaaagagtaaacatggctccagctgcatatgtagcagaggttggtcttgtcgggcatcaatgggaaaagaggcccttggtcttgtgaaggcttgatgccccagtgtaggggaatgcgagggcggggaggtgggagtgggtgggggcacaccctcatagagcaaggggagaggagatggaataggaggtttcgggggcggggagggtggtggtggcgcggaaacctggaaagagggtaacatttgaaatgtaaataaagaaaatatccaattaaaacaacaaacaaacaaaccaacaaacaaaacattcaaccagtcggactggggctcttcctctctccttgacctgatgatacactgcgtagcattcggttactccctccaccagatggtccatgcgacggctgcagagaaaaggttcagactcaggcgtgctccctttggaaacggaccccgactctccatccacagttactgtttccagctcactagtaaaatgcatggtaagatgtatgggactttcctttgtcgtttaactagctctttttagatatcatattgtaaccatcaaactcaatggagacccttattttataatgcgtgatagtgaagaaagcttaaggatgtagcaaacttaagggattaatagccctgttggtaccccaaagcctggcgtaaaccttccgataataattcagtcgccataataggcagactgatgcgactaactctattcttcttggcaggagactgcatcgtgtctcgtgggaagcttcattgttgtaggggtgtttccttgcacgtcttctgcctctcctttttccgaagtctcttgcttgacatttcttatgaatatcatctgcaatcccatcttcctgagtatctgcaatgcttggaacagctgggtttgttttgattgatgctcacacaagtatggtatcactctgaacacgactttccatatgatgagtgttctgcaggcatctgctgcatgggtggtcttctccatcgcacaatcccttgttaattcgggaaggttctcctattgtcatgtccattactctgaaatttcatttgctcattaatctcttacttaatggtattctttgggaagaagtgaatacatattaaaaataaaaacttacatttttagtgaaaggctcatggcaatacaatatagaatgtttggaggtcatttttccctgtatatttaacatttatcattttttataatatgttatgttttttcaaagcatttatttactttcactgtgtatgtgtgtgtgtgtgtagaagttcctgcatgtatgtatgcacagcaagtgcatgctcagaaccacagaggccagaagaacgtttgagattggcactggagttgtaggtagtcctgagcgtctgtgtgggtgctgagaaccaaactgtggtcctctgaaagcgtagcaaggttcttaaccactgagtcatctcctggccccatcatcctgcttaatcattcattttaattacaataaatggtttttagtgtgtttgggggattataagatcttttgcagaattcagtttgtaaatgttttattatcacctaaacatctagtatgtccaccgtagatatcttcttttcttacttctgcatttagtcaaccaatgatatgagttcaatctttgtgtccttcctaaactttgatgtaagaggactcacataaataaaggttcagtgtctcatgactgatttcttttactcagagtgtgcttttttgattccttcatgatatagtacatactaacctttcagtcacttgggctttactgcaggatggcaacacatcttgctcatctgccatcacttgatgaccatttggaatattcccaagtagctaataaagaataatgtcgctgtcagagctcttgatgatagtcatcaggaactcttatttactgctagcaggactggggactagaatagccatcagggaaagcagcgtggaggtttctcaaaaaaaaaaaaaaaaaaaaaaaaactaaactaaaaatagaactgctgtgtgacccagttacccagcgctgaagcagttttctgaaggtttgctttgtctactgcagaaagacttgtacatctgtgtttaccattcccttcttcccagtactgaggaaatggaagcagcctagatgccccagtgctagatgacaggataattaaaatggggcacacacaaaaaatgaaattctgatctgatagtaagaatcacaaaatcgtgactatttcaggaaagtagacagaactggaaagccttatattcagtgaggtaatccaagctcagcgagatgatagcagtgaggttttggtcacatgcagatcctggattctcatggtcatatgttttcgcagatgggcataagtgtggtaaaggtaaaacaactagaaaagggacaaagggtagagaagagatgaaggatggggagtggagaagaacactcggggcatggaagctggaaagagaaggaaggggacacctgaatgacatgttttgtttgaaaatgtcagtgagatgcccaatactttatataataattcccaagagaaaaggaaaagaagactgttggtgtccacattcctagggacgcatgccgccttccttccttcctttctttctttctttctttctttctttctttctttctttctttctttctttctttctttctttttctttctttctttctttcttttcttccttccttccttccttccttccttccttccttttttccttccttccttccttccttgctttcttgctttaacaattgtatcacatatatatctcattataatattgtccatcatcacctgctctcattccttcctccttcctcagaagcccatttttccagagtcccctcatttatttatttattttttttgtggccaactgcattgcattgtcttaattaatctttgtaaatgggcagataattactactacaaggtcatttttgccagtcgctactttaaggaagaggactcttgtctcctcagcaacccctatgtttagcttaaaacttacacgctagggggagccgttcaatgtctctaaaatggttgtctagtaaaaatatggaacccaattcattaccaacaaacaatattgatcagcgaaactggctaatatgcaaattcctactcttttttcattccaataataaatgttttgattttatatatatatatatatatatatatatatatatatatatatatatatatatatatatctgcaaacgcatagtaaaaagccccatggtttttatttaaaacagtcctttaggtgctttgaaggaaacagggttaaaaaatgannnnnnnnnnnnnnnnnnnntttcttcccttcccttcctttccttcccttcccttcccttccttttttcccttccttccttcccttccttccttccttcccttccttcccttccttccttccttcctttctttctttcctttttttttggatggcttgctgagaatgaaatggctggggggctcttaatgactttggttactctatgcttaagtttggctttctaagaagcagccacattgccgtctgaaatggatttgccattggaagctgtatcagcacgttgtgaaaggctttttccccctccatgtccacatcagcatttgttagtctagtcattataggtgaggtgagaggtcgtgtaatgtgtcacagtggtctttgttttgattttccttattgattaacattgaattctggcatatactctcatttctaaaatatctgctcaaatcttctactgataatcttctcatattaaaaaaaaaaaactcaatgaatcctccatattgatagggttaagattatgctgggttctcactgggttgttctcttgtgagtgacccagctgccaaatggacactcatacttttgaagattaaatgaatgctaactgggattttgtcccattggtttataaagttaaatgttctcctcccaaaccatgctgacaaatgtgtactgtggatcaagtttaggaaaatggagaataacgaagacactatgtcttgcttcatagggacataggtgttgattcagaaatatttaatacacatgccaaggaaatgaactaatccctggatgtcagattcctggtaagaggtacgccccccgaggaggtcagagagatggctcagtggttaagagcactgactgctcttccgaaggtcctgaattcaattcccagcaaccacatggcatctagcatgggatccgatgccctcttctggtgtgtctgaagatagctacagtgtattcttataaataaaatgaataaatcttaaaaaacaaaacaaaacaaaacagaaaaagaggtgcacccctgagcctacaattaaggcaatgaagatatatctagggcatgttcctttgccatgttgctgatctggaaaccatctagaaatattcagtatgtctcctcagctcttctgctgttcaatgccccagagctgaacacaatcccattaatagctaccacacgtaaacttttataggtttttctttcgtgccagatcacctctatgtcttatatctaatttgccatatggaaccaaactgactttcctcccactgtgccagtacagatctcatgccctcaccattagctcgttgccttgccatttcgtcttctgacagaggtgacacatccttaccttcctctgcctaaactggatacagtttcttcagcattcaattagcctttgagttctattttattcttgtcagaacacactttattttgttgttcttttttcttctctagtttggcccctctattacttgagggtttgtctacatgggttgtaacaagggtatattctctatgacaaattcctgggtgtgcagagggagtttgggaaaggcttctacagcagcatcctggagagtgagtgacattgtagagtaatgtcatcaaacactactagagagggtgcaacggaatccccacttacttgaaggtcgggttaacttacaatgttttagttaaatggtcttctggatttagtgcttgggaaacctgggacactgtttctagagtgggttttgtttgagatgctatggaagataatatctggagcccaggcccgagagaaacaagatgatgaaactccagactactgagttgtctggtatgtggtccaacaggcccttctactccagtttattgctgtctggcttttcatttccttcttccagtggagtccctagggaatgttaaatgcctacctaacatactaatgtctatgctatgcaaagtgatagttgccaaatcagtttatggacataattcttgcctaaggaaactcagggttaggaatggtgttgtgtgtaaaccaaacatatgatttattttcttgttttagggtgcttaggtcatcattcaacctgtagaatcatataagttggctttactttctcttggaaaagaagtctatcctagggctaaagttttaaaggatctttttaaaaacttgcctttgagatctgacacacgtatgctgccttgatgactctctgtgggcttcttacgtgatgttgtaagtaccttaggtagtgggcgttagtgagtgaggtgcttctggttaaacttcccagctctcttctctgggcagaataagaccctgcccatgactttgctctttcagcttgtctcttgcaggtctcttggcaacaccccaaggggaaaagtgaagaaaggaggttcctgtcttggttgctagaatttcctcaatcttggtaactcttggttctaaaagcagttctgttttctcagtatataacatataattggcagagaattcatttgatattccaacacttcatttacttggcatagttagggaatgaaagcctttttattaagccaattattaagcaatcttgcctctttgatcgctaaaacatatatttaactgtctctacaagctacgggacatatgtctctgcatcattgagattttcaatggaccacagtctaatgccaccttcataggttatgctgaccatggggagctccgacttctgtagtgctgttgtccagtgtcttggtgtagccagggactctgctgaaggtaggtctagttaatgcttccctacagggtctcaggctgcttgtgttgcttccttttgtcttgaatggggaagtctgttttctcagtcttgcctgggccttattcttgctgacagcttgttatcgctttcttgattctagttctctttgagccatttacttcctcctctccccagattcagactttactaattttataccagaatttaccagactttacaggctggacaaatggctcgatagatttgctagaacttaaaactgtcagcccgaggcaccttctctaccgtagctcaaatgctggatacttaatgaacacagtgtattatctctgactggctagttcttaaaacttaaaaagccttttcaactataggtaattgaagacatgaactagtagcctcctcagaaagggagtgctcttacattatgccttagccaggattcatcacaggacatacatcactgtatgaatcccagaaaacacaatttggccacgagtccctgaatacagtagtttgaatatgtgtaaatagctctaatgagtactaaatacactgcttaactttataaccaaaaagaacctggaaatacccaagccgtcaaattactttaagttccttcccagtacttgaccatgataagttgaattctcccaagtagattggagattgtactcttctaactggcactctacttgtaaagcaagcctaccgtggtttccttttacatatatggtggatccacctctctctcttcccttcttgtctatttctgtttgacttttagatactattactgacatgatcttgactttggagacttgctgtcctactctgctgactttaatcatggtgggagcagtctggcaattctgcccatcagatactctcatcgtctccctcctgactccttccttccacccaactctctctcttttcaatacagctttgccaccagtttgatcctctacaaaatgttatgcttcctttagatttaccttttccaaatgacccctttgaccagtgttccccttaaaccccgtcttcttgcaggttcttaattacgtgccaagcagccagaaattagttacatctttacccaaaggcaaactggaaagggagaactacagggtagttttgcattcttgggcttactcacactggttcatccgggaaataaaactgtcagcacaacatgtctgggtacagaacagagaatgatggcatggcgcacaattcaaaggattgccgcaggctaaagccacgatggaagttttaattaaaccaaaacggtcagacacgggtgagtgccctagaatggaacaccatcactattcatgttaattttaaatgtgaatatatgaaggctcttgcacgcattatttcataattaatttttttcataagttacaaatttcccagatagttcctaaaggaaggctggagaggacaattcattgaacgacatttggtatttcagaagttcttttcttagtcattatatttgtggccaccaccatgggtttttttttgtttgtttgtttgtttgttttgttttgttttttcttttgtatatggttttcaagagtgtaagatagctctgtctttgaggtgaacatggttaatgactatctaccacacttaaaaaaaatttttgggttctttgggtacatgctaggtcggaggtcaaagcaagatgaagacatgtattgaagttttggagtttccagtgtttaaatcagctactccagaaagcacacatgtttgtcaacccaataaatgttaccttttttccttttcagttgagtattatcctggcaactggtcttagcaagtcaaatgttgtaccttacgtaaaatgctttctgttttcatactttgttatattagaagtgtacgttttctgcctctattaacatgaccagttttactatccctgacttaagtggaagcaggtaggtaggtcacagctattcatatttgcgtcacagttaagaaataaggctgatataataaggttgataagaccattttcagttgaaccagattatcaggaaggacggacctgccaggacacatcagaagccagagctcaaccctagggctatgaggagaactgggcgtaggggaacgttctgtggtgtgcaaaaatgaattttcacacaagaaatactttttttttttttaaaattgttatgtcccttacatcatgccatgcctgagatatttgctgtgcaggggttcaagctcatgaaactatgtaatcagcccttacctgagatacaccctgacgttgatttagccagttacttcctgcaaggccatgtctgcattggtaataccatgcacgctttattcgtaaaataagaatgataacaaccctgcaaagagttcagaagaacaaacactgtaagagggcattgcatttagatagtgaaagatgtaggtagctgaattcatagaagaaaagcagagtggagatctgggcagctaatacccagagaatgcttagctcaggagacttaatcaggataatccctacagggatgctcagagggccagctccatctccaggtggtccgagatgtcatggagttgggaattaagattaaccatcacagagaggttgttaaaataatactgaacaaccggaatgatttccatattggatatttatttctctttaggatcagttcgacaggtttttgagcacctgcctttgcccccaaggtcagccttgggaatgccaggtcagcctgttctaaattgcttgttgagttgtagccttcatcaaacccatcagaatactttaaaaagattccctgtttagtttagaattattttggtagattgactgtgtaacatattaaaacaccattggtagcccaagtgtcaggagtgagattttgcaaggtttgaaatatttccctcacatccttttatgtttatagagcaaatctcaaataagaaaggcatggtcttgatgcaactaaggttagttctgaccacaatcaagcatcatagaaaacaaacaaacagcaaacaaaacaataaagtgggggtgggggaagaagcagaaatgaaatccggagagaataaatgtgtgtttgggaagtgtagaattctttttcaatttcatttaatgtttcatattagagaatttaaaaatgcagagaatttgaaaatgtttcaagaaatgcccatgaacccatcccccagcctttgctaccaacattttctttgacttggtatcaaagatgactgctcatctttctaagaatgcaaagaaaacttaaatcagtttacttttagggtcagatttgtggactctagtttcctggtttggaagcacctgtcatcacttccgagaccagcatttcctggttttggagcatctgccttaacttccagggtcagcagtagtgatgtcggtccagtcaacccaaagctgcttgttgacttttgtggatgtaccgcgtctccacagagcctggcggtgaagctgcacaggaaccatatgggcggtttgttaaactgatgctctcccagacctcactccctagaactctgagttagtcaatctcaaaaagcaattatggtcgtgattttgatgtgttagtgaatttggaagccccaggccttgatagaactgaaaaccaatatcttagagcttttgaacaaagaaaggaatgggggaggggtcagtaatgtgacagataaccaagcacaaagctctgtgatctacattcttagagtgggatagataagttattagttcttttgcaggaccagagccataaactgagtccaagagaatcagcaatgtctgatgaagccaagaaataggagttaggtgattcaaattggaaatctactggatggagagtgtagctgcatggataggagtgaagagtcagcaatgagctcactggggctgtgggtttggttggaggtcaatgttaggacagagcaaggtaagcttcaccaaacagttactgagcagccccgagggtcactagcctctggtcagactctaacttccttccgtgggttttagtttgactctgtccaatattcttaacctgcagctcagtggatggagcccttctgctgggaggaagcattctcctgatttctcctgctcttcctgattttctatacttgctaatttgagctcctgagactttctgtgcctttttctcactatggcattggttcattgttctgaaaccttgttaggttcatagcaaacacagcattcggatttctttcagatgtgtttatctccaagatctctcacttctaccactctgatattcttttggtgattattttttttcattcatgattttattttagtcctcaattattaaccctattaagcaagaacaagagcacagtcaggctgtgttactttggagacctttggatccttgacacgacattgggactgtaggggctgcaataactgtcactcttatgatctcacagtttccgaaggtcccagatctggacatagctagctggtggtttaggctcatttattttctttttgaggctgtgagtaagatgttgcctggctctgaggccatttcaaatggcacaaaagaatccatgttttagctcacacatgtagttttcagaaaagcaccagcctttagcactattattagagcccagtgtctttcttagtagactttctgcatcaaagttgtactaggaagagggataacaagctagagtatacctgaaatcttactgtgtgtgtgtgtgtgtgtgtgtgtgtgtgtgtgtgtgtgtgttcatgtgtaaaggtgcaggcacaaacatgccacagtgaaagtcagaggacatcgttaggagtcagttctcacatctactttgtggggacctccctttgaggctctctggttttgttgttcgctcttttgtatgctaggctaggtgttctgtgagcatctggggattctgttgtccttaccttctgacacataaacactgggattagtaacatgtgctgagcctggctttatgtgggttttgtggattcagactagatcctctcacttgcacggtaagcatttcactcactgggctgcctctctagctctgtagacaaatctcaggagtgacacaccttctgctggatgctgtttgtccagcacagaacaatctttgtctagggtaggaggggaggggattatgaaagataggggtatcaggaggctgaggccggctactgtgttgtccaaccgtctctaagttacattgttatcgaaatgctcccaatactcctgtgttgtttgacgatgaaacaagggaggcactgaacaacttatcaggaaaagtattggtacgaagaccgagtggcttttgtgtaccgaaggccaccatggtcactgaggagatcactgaaacaacaagagatgagctcttatcctgaaggtctttctgatatggttgagaaaacagaacatatcccccccccccacacacacacaccctcaaggtactcagagcccactttctcacggtaaactatgtaaactcaactcaaccatagcttaggcaaaatgaagaatttcctgaaagacctgtgcagctagggaaggacagaggtgtgggcacagtcagatgaaaagcaccgatcccaccagagttctttctgctcatctcccatgtcagttgctctctctctgcactgatggccctcattcagccagacttttttttttttttcacataacttcttggcctacaccttgaggctgtgtcatgaagaggatggtgtttgtgtgtagttagttcaaagggctttgatgggtacagcctgagttctcaactgaccagtgggtcttcctctctttgttcagtcctcactaagcatgaggactctggcagacaatggaaaccaagtgctggatttacaaatccaagacaggaatgcagagaccacagggatagggatggagtgggaaggttcatagatctgcttagattgaaggacagttcttcaggactctttcacatgggagaatgtgcaagggaggatgtgtctagaggttacaagagattatgactgctccttccatttttttaaaaaaaatattattctttaatcttttttttacagtccagttgttatcccctcccatctgccctcctactgttcctcatcccattcctccccagccccccaaaaggatgtctccacttccccacccccaccccactggactccctgggaactcaggtctctccaggattaggtgcatcttctttcactgaggtcagaccaggcagtcctctgctgtatgtgtgttgaaggcctcatgtcagctggggtatgctgcctggttggtggctcggcgtctgagagatcttgggggtgggatgtccaagttagttgaaactgctggtcttcctatggggttgccctccttctcagcctcttccagcttttccctaatttaaccacaggggtccctggcttctgactattggctgggtgtatctgcatctgactctttcagctgcttgttgggccttcagctccttccctttgctccatttacttggttgagtcttcctgcctagtctgtaggatgtcagttggctttatttaaatatttcctgggctgtgttctgtgcagcacccagcttgttgaaaactacttggcctgctaacaagtcacaggggtttctgggcaaggtctttgctttgaaggaaaacgggagagagcaaaggagatcaagatgcctttgttttcacagaagtacagtcagaatgagtaattaagaaagtgataaatgaactcagagctattatctgagccattagtcaaaagaagatggatgaggcatgggggtgcttgtgctcctgcacaataggaagaagttctggaagctgggcttcttctgttaatggtttcatcagttggctgatgagggcagaaatctttcctggacaaacgagctgctcttccaaaatgacacacttgaagtccgtaggcaggtgtgtaaatggtgtgattctacaaagattgctccctaacttcaatcaaaggctctaaagcagtcaatgagaaatgagcactgtttcctgtagtcttgggcatctgaatacttggtcccccactgtttaggggaggttcaggaggtgtagccttgctacaggaagtgtgtcattgggggtgggctttgacaacactgtcctgcctcttctgattcaagctcttctgctttgtgcctttgattgagatgtgagctctcagcttcctgctcttacctccatgatggctaccgtagtacttcccctccatgatggacctttagctttctggaattgtgggccaaaataaactctcgattgttttttgttttgttttgttttgttttgttcctgtaagaagccttggtcatggtgttttattacagcaacagaagtgtaactaataaaatgctcaataacaaagtgcctttgtcagaagcaactattttatgctattgttaaaaaatgaggagtgccaggcgtggtggcacatgcctttaatcctagcacttgggaggcagaggcaggcagatttctgaactcaaggccagtctggtctacagagtgagttccaggacagccagggttacacagagaaaccctgtctcgaaaacaacaacaacaacaacnnnnnnnnnnnnnnnnnnnnnnnnnnnnnnnnnnnnnnnnnnnnnnnnnnnnnnnnnnnnnnnnnnnnnnnnnnnnnnnnnnnnnnnnnnnnnnnnnnnnnnnnnnnnnnnnnnnnnnnnnnnnnnnnnnnnnnnnnnnnnnnnnnnnnnnnnnnnnnnnnnnnnnnnnnnnnnnnnnnnnnnnnnnnnnnnnnnnnnnnnnnnnnnnnnnnnnnnnnnnnnnnnnnnnnnnnnnnnnnnnnnnnnnnnnnnnnnnnnnnnnnnnnnnnnnnnnnnnnnnnnnnnnnnnnnnnnnnnnnnnnnnnnnnnnnnnnnnnnnnnnnnnnnnnnnnnnnnnnnnnnnntccacctgcctctccctcccaagtgctggcattaaaggcgtgtgccaccactgcccagcctggctttttaaaataagatataaagtatgttactctctgtctctgtctctctccttgtggtgtgtgtgcgtgtctggtataagattagagtcataaatttcaatttctgtttaattcaaaaattggcctagagctgatcgtgatattaaattctcattttcccttatctcacatataattcatgtatctaaggaggaattctgtctgtaaaataacattgtagactcagacattggtccatctaagaatatttatgtcatagactgcttagctccaaaatttgtctggatattaacatcctataaagacagtttccctataatatgactttcctaaataggcggatgtgagttaacttgtccctgcttttttcagaaccagaggaaaagctgccatcccatgtcctctgctacaggattttctgtcgagtgaaagatcctggatacatcccaagtcaggtaaagtccgatctttaaggccctggaagaacacagacaactatcaactgtactgcaagacacagagagcaccgatgtttcttagacagaaagggtccagggatggggttgtggagttctgttacaacacatggcagtttgcctgtttttaaagagaggattgcttttggaaacctgtgatcctcttgttagcctcaacctccttcacttgtaggtgtttcagagaaatctgagccccggtgaagctatttttatgaagtctcttactccctcttcacccttcccccaacttgcttgtaaggagaaattaagtgaaaatgggcttgacacaagtataccctggcagttaaactggctacacatcaacgattcattagatttctatgagtgaattactttattaattcacttatttggcaaatgtttatgatgggcctgtggttggcaagtgacagagttaatgtgattctttttttatatggcaacattccaatgtgaacccatctgtgaatgccatgctcaggcgaacaccaggtagatgtcatagccaagtggatggatatgtttgtgatgggctcgatggcaaaccaagtcacttcttcaacatggaatttatagcctaatgtatacagatgctgagttcgacagagccatagatgggacaaagtgccatgtttactgcccctgggacatggccagcatgggcttccatgagagtcgatggcttctacgggtataaggacatattttacattcctcctctgaggaatgtcctccctgttaacattgttaatgactctatgataatccgacaaagcaccagcccaggtggcaaaggtgtggctaatgtctcagcaaaaggtaaatgctgggaccctcaggacagccttcaaggctgtagaaaaaaactctaaatatcctgagttcaaagatacataatttctcaactatgtaaaaaatgtcaggatgcaatatgaattgtataaggagcttcacaaatctaaaggaacagaggcagctacacaataagccagcttgtcagaaggatacaaagacaggcagagaaaaatgtaggcggattcctgagttcaaggtcagcctgagacagagtgactttaggtccaggcatgtttgggactgtgattccagagcagggtcctgcccagctattttttttttattagatattttctttatttacattccaaatgttatcccctttcctgggttcccctctgaaaacccctatcccttccccactccccctgttcaccaacccacccactcctgattcctggccctggctttcccctacactggggcataaccttcacaggaccaagggcctctcctcccattgatgactgacaaggccatcctctgctacatatgtggctggagccatgggtcccttcatgtgtactctttagttggtgcttcagtccctgggagctctgggagtactggttggttcatattgttgttcctcctatggggctgcaaaccccttcagctccttggatcctttctatagttcctccactggggaccctgcgctcagtccaaaggttggttgagagcatccacctctatttgtcagacagtggtagagcctcttaggagacagctatatcagggacctgtcagcaagctcttgttgacatccataatagtgcctgggtttggtgactgtatatggggtagatccccaggtggggcagtctctggatggcttttccttcagtctctgctccacactttgtctctttaactcctcccatgggtattttgttcccccttctaagaaggaccaaagtatccatactttggtcatccttcttcttgagtttcatgttgtctgtgagttgtatcttgggtattctgagcttctgggctaatatccatttatcattgagtgcatacagtgtgtgttctttgtgattgggttacctcacttaggatgatattttctagttccatccttttgcctactaatttcataaattcattatttttagtagctgaatagtactgcattgtgtaaatgtaccacattttctgtatccattcctctgctgacggacatctggggttttttcagcttctggctattataaataaggctactatgaacatagtggagcatgggttcttattacattttggagcatcttctgagaatatgcctgagtggtattgctgggtcctcaggtagtactatgtctagttttttgagtaaccaccagactgatttccagagtggttgtaccagcttacaacctcatcagcaatggaggagtgtttctctttctccacatccttgccagcacctgctttcatctgagattttggtcttagccattctaactgatgtgaggtggaatctcagagttgttttcatttgcatttccctgatgacaaaggatgttgaacatttctttaggtgcttctcagccatttggtattcctcaattgaaaattctttgtttagctctgtaccccatttttaaatagggttatttagttatctggagtctaacttcttgagttcttagtatatattggatattagccctctatcagatgtagggttggtaaagatcttcccccaatctgttggttgccattttgtcctattgacagtgtcctttgccttacagaagttttgcaattttatgagatactatttgtcaattcttgatcttagagcataagctattggtgttctgttgatgaaattttcccctgtgtccatgtccttgaggcttttccccactttcttttctattggtttcagtgtttctggttttatgtgaaagtcattgatccacttggacttgagctttgtacaaggagacaagaatggattgatttgcattcttctacatgctaaccttctgttggactagcaccatttgtttaaaatgctgtcttttttccactggatggttttagctcctttgtcaaagatcaagtgaccataggtatgtgggttcatttctgggtcttcaattccattccattgatctacctgcctgttactgtaccaatactatgcaggtttttaaattttatttatttatttatttattttatcacaaatgctttgtagtacagcttgaggtcagggatggtgattccaccagaagttcttttattgttgagaatagtttttgctaacctaggctttttgttgttacagatgaatttgcaaattgccctttataactctttgaagaattgagttggaattttgatgggaatagcattggatttgtagattgctttcagcaatcttcaagtatctctccatttagtttgacattggctattggcttgctgtatattgcttttactctgggccttgatttcctgatctttccaaaacttttatcatgaaggggtttttgtcaaatgctttctcagcatctaatgaaatgatcatatgttttttttttccttgagtttgtttatatagtggtttacgttaacggatttccatatattgaaccatccctgcatccctgggatgaatcctacttgatcatgatggatgatcattttgatgtgttcttgaatttggtttgcaagaattgtattgtgtattgttgcatcaatagtcataagggaaattggtctgaagttctcattctttgttgggtctttgtgtgtttgagtaattgtggcttcctagaatgagttggttagagttccttcagtttctattttgtgaaatagtttgagcagtattggtattaggtcttctttgaaggtctgttaggactctgcgctatacccatctggttctgggatttttttggttgagagactattaatgactgtttctatttctttagggtatatggcactgtttagatcatttatttgatcctgatttaactttggtacctggaatctgtctagaaaattgtccatttcatccagattttccagttttgttgagtatataggcttttgtagtaggatttgatgatttttttggatttccacggtttctgttgttatgtctcccttttcagttctgattttattaatttgtatactgtctctgtgccctctggttagtttggctaagggtttatctatcttcttgattttttcaaagagccacctcctggttgtgttgattctttgtttagtcctttttgtttccacttggttatttcagccctgattttgattaattcctgctgtctactcctcttgggtgcatttgcttctttttgttctagggctttcaggtgtgctttcaagctgctagcataaactctcttcagtttctttttggagacacttagaactatgaattttcctcttaccactgctttcattgtgtcccataggttttggtatgatctgtcttcattttcattaaattctaaaaagtcttccatttctttctttatttctttcttgaccaagttatcattgagtagagcgttcattgttcagcttccatgtgtatgtgtgtcttcttccattgtttttgttggaaattaagactgaccttagtccatggtgatctgatagggtacatgggattattttaatcttgttctatctgttgaggcctattttgtggccgattatatggtcaattttggagaaggtaccatgaggtgctgagaagaaggtatattattttgctttaggataaaatgttttataaatatctgttagatccatttggttcataacttctgttagtttcgctgtgtttctgtttagtttccatgatctgtccaatgctgagagtggggtgttgaagtctcccactattattgtgtggggtgtgatgtgtgctttgagccttagtaaagtttcctttatgaatgtggatgcccttgcatttggagtggagatggtcagaattcagagttcatcttggtggacatttcctttgaccagtatgaagtgttcttccttatcctttttgataacttctggttaaagttgattttattcgatattagaatggctactccagcttgtttcttgggaccatttgcttggaaaattgttttccagccttttactctgaggtagtgtctgtctttgtcactgaggtgcatttcctgtatgcagcaaaatgttgtgtcctgtttacatagccagtctgttagtctttttatttttttcccttggggaattgagtccattgatgttaagagatattaaggaaaattgattgttacttcctgttatatttgttgttagaggtagaattatgtttatatggctatcttcttttagatttaatgaaagattactttcttgctttttctagggtgtagtttccctccttgtgttggtgttttctgtatattattctttgtagggctgggtttgtggaaaactattgtgtaaatttggttttgtcatggtatatcttagtttctttgtctatggtaattgagagttttgttgggtatagaaatctgggctggcatttatgttctcttagggtctgtatgacatctgctcaggatcttctagctttcatagtctttggtgtaatgctgataggtctgcctttatatgttacttgacctttttcccttactgcttttaatattctttctttgttttgattattatgtgacaggaggaatttctcttctggtccagtctatttggagttctgtaggtttcttgtatgttcatgggcatctctttatgttagaaaagttttcttctataatattgttgaagatatttactcgccctttaagttgggaatcttcactctcttctattatcattaggttttgttttttcaatgtgtcctggatttgctggatgttttggattaggagctttttgattttttgcattttctttgactgttgtgtcaatgttttctatggtatcttctgcacctgagagtctctcttctacctcttgtatgctgttggtgatgcttgcatctatatctcctgatctcttttctggattttttaacttcaaagttgtctctgtttgtgacttctttattgtttctatttatatttttcgattttggatggttttgttaatttctttcgcctgtttcattgtgttttcctgtaatcctttgaaagatttttgtgtttcctctttaagagtgctacctgtttacctgtgttctcctgaatttcttttcttttcttttacttttgcttttgcttttcttttcttttcttctcttctcttnnnnnnnnnnnnnnnnnnnnnnnnnnnnnnnnctttctttctttctttctttcttccttccttccttcattcctccctccctccctccctccctccctccctctttctttctttctttctttctttctttctttctttctttctttctttctttcttaattttttgagacagggtttctctgtgtagccctggctgtcctggaactcactttgcaaaccaggctggcctcacactcagaaatctgcctgcctctgcctcccaagtgctgggattaaaggcgtgtgccacaactgcccagcttctcctgtatttctttaagggagtcatttatgtccttttaaaagtcctctgtcatcgtcatgagaagtgattttagatctgagtcttgcttttctggtgtgatggtatatccaggacttgttatggtcagagaattggattctgatgacgccaagtaaccttggtttctgttgcttttgttcttatacttgcctcccaccatctgactatctcttgtgctacctgctctcgatatctgactggagccggttcttcctgtaatcctggttgtgtcagaactcctcatagtccagttgtctctgtgatcctctgattcggagatcctgtgatcctgagattttggttgtgtcagaattcctgggagtcaggctgcctctgggaccctgagatcctgttgtgaccaagctcctgggatcccggatcctgggatcctgactgtgttagaatgcctgggacttgagcctccactgggtgctgttgggactggctgcagaatttgtgcccaaggtaagctggcacagaccagaaggaacccaagccactggtcaggcagggttcctgcatccctggatcctgctggtcacaattattcctggtggtgttggaacagctgttctcctattcatccctgatcctaagatcctgggcttgctagagcacctgggagcgggggattctctgggtgctgtgggactgactgcagagtttgtgctgaaggtcaacaggcacagacaggaaggccccacccaactatcttattgtctgtgtttatgctttctgtctctccctaagagtcaaggggttaaagtcacaggatgctgatttatgggatggtccagaggaaacctagaataaatagctgaattgataggtaaataagaatctgggcttttggtttgtatgtgatgagctagcaaaaagctatagcagttctgttttagaatttttttctattgagannnnnnnnnnnnnnnnnnnnnnnnnnnnnnnnnnnnnnnnnnnnnnnnnnnnnnnnnnnnnnnnnnnnnnnnnnnnnnnnnnnnnnnnnnnnnnnnnnnnnnnnnnnnnnnnnnnnnnnnnnnnnnnnnnnnnnnnnnnnnnnnnnnnnnnnnnnnnnnnnnnnnnnnnnnnnnnnnnnnnnnnnnnnnnnnnnnnnnnnnnnnnnnnnnnnnnnnnnnnnnnnnnnnnnnnnnnnnnnnnnnnnnnnnnnnnnnnnnnnnnnnnnnnnnnnnnnnnnnnnnnnnnnnnnnnnnnnnnnnnnnnnnnnnnnnnnnnnnnnnnnnnnnnnnnnnnnnnnnnnnnnnnnnnnnnnnnnnnnnnnnnnnnnnnnnnnnnnnnnnnnnnnnnnnnnnnnnnnnnnnnnnnnnnnnnnnnnnnnnnnnnnnnnnnnnnnnnnnnnnnnnnnnnnnnnnnnnnnnnnnnnnnnnnnnnnnnnnnnnnnnnnnnnnnnnnnnnnnnnnnnnnnnnnnnnnnnnnnnnnnnnnnnnnnnnnnnnnnnnnnnnnnnnnnnnnnnnnnnnnnnnnnnnnnnnnnnnnnnnnnnnnnnnnnnnnnnnnnnnnnnnnnnnnnnnnnnnnnnnnnnnnnnnnnnnnnnnnnnnnnnnnnnnnnnnnnnnnnnnnnnnnnnnnnnnnnnnnnnnnnnnnnnnnnnnnnnnnnnnnnnnnnnnnnnnnnnnnnnnnnnnnnnnnnnnnnnnnnnnnnnnnnnnnnnnnnnnnnnnnnnnnngattcagatttctggagagcacacacacgctctttaagaatcttttctaggggctggagggatggctcagcagttaagaacactcactgattgttcttccagaggtcctgagttcaattcccatcaaccatatggtggctcacaacagtctgtaatgggatctgatgcccttgtctggagtgtctgaagacagctacagtgtactcatacctaaaataaataaagtttttaaaaatatgtttttttctgataggagttctcattttatttggaaaatctatggagagtgaacacagcccttctagaaaatttcattgctcttctagaagttttataatagaatttctaacagaaatcccagtaattacatagagaggtaacacagctcttttagacggttttctagtggctatccagaaaaggctgtctggagagcataaagttctcttagaattcttttggctttctgattttgatcgggaaacccaagagttacttttagaacgttactaacaggatttctgacttcatcagaagacttgagatttttttttttttgcatattttgtaaatttggtcagagaacccatgaactatccagggagcttttaggattcttactagcagagagaggggtctcaagcagaaagctagctctctcaactagagagtattttagaatagcaagaaaaaactgtctagagcagagcagaacacacacacacacacacacacacacaccttctcagaatccctcttcaagccaatgctggtccttggcatacaaatgcaaagttttctatgttttgttataatgcaaatgattgcaatgtttatagcatactaaccatcttgctcttaagagaaaataaatcttaaatttcaaatggctgactggtcatgtacttggggagtaagttctgctttggcattagaggccaccctttatctcttcagttcacaatgcagtcactgaaacaacaccatccctctttatcgtaggtaaacacaagaataagttattttttaattgaaaacagattctctttctatacaatatatctctactttccagtgttactctgccctcatccaattcctccctccacctcctcttagaaaaagagcaagacttcaaaagtcaatagccaaaaaagtcaaaacaggatacaataagacaaggcaagaatatgtttttcctttttctttttcttttttttcccagagctgaggactgaatccagggccttgccctcgctaggcaagtgctctaccactgagctaaatccccaaccccaagaatatttttttctaaggatagaaaattgtttcaatgttggcatttagggtttcctgcaaattcgcataccaggtgaacaatggaagtagacttcattatagctctttttaatccagtaaaaaggttcactggtcaaggaattgttattttctaataagaagtacaaggtactttagcatctcaggaccatgctcattggaaaagagttaaggttggagctctgtattttggccttgaaaactttcacggcagtagacaacaggacccttgttttccatctgcacactggagacactatggacacgaaggagcagctacctggcaggccaagaactcctcatttcctcccagcaaatgctgagggctgatgctaagaactaaaagagcaggccggtattggagtgacgaaagaggataggtcctgggtgtacctgtcaagctgatgctgtacccttagaagtctcttatgcttacttattagagtcccacgacagcagttctccgatctacttcaaattgccaccacaaacaacctaaacccatagactaattgctacatattccaagggtcagctatccaacccggtctctggaataataaaagtcaaagtgatagcaggattgcattcctcccagagactctggagtctctttcctcatcttcttcaatttctggatcctgcagagcaatttgggttgttgtctgctcccatctcctcacccttagtagcagagtctccaaaagttctgtttcctgcttctgttaacacctgtcccctcttgctgttccttccctgaggctagagagggccacctgggcaacccaaggcggtttcttatcttgaggtccttagtcccagctgtgcaacttacttcatcacagaaggtgacacagctggccgtagcttctggggacttcagtgccttaggaggcattcccttcagttcagtgttcagatgctctcttctgctggggtcatggcaattcacaccccgggagaattttaaagaggtacacaacaacaaacccactaaaaagaaaaaaagaagaacgccctccaaaaccagccatcaagataaacagtgttttaaagtattaaaatagaagttcatacaaagtccatgctggaaaaattccccaaaaagaaaaaaaaaaaaaaaagaagaagaagagacaattacagtagaaacattttcatttccgtcaggctgctgtatgactcagtgtggtgacattcactgccacgaagtgtggccagcatctgatacagactggttgcatgaggcatactagcattaggctttggaaagatcaaccgaaggaagcagggatctgttgtgcagtcttcaaattggctaggttttgagactggcaactcaaagcaagagaaagtgtggctagtctccaaggcacaggctgctcgccagagcctttgctttgagacaatgtcagggagctgtggtccttagcaatattgcctttcagttcgtgagaattctgggaggtaagcattgccctttatgaagttcctctctctgtgcacacggccaacgttgagttatttgcatctaatgaccctgaacagcctaacttatcacagagaagagcacctgatgcggtggctttagccacagctatgtggctggctgacctcattaagagtgtaatgacagtttcttatctgaggaaatgaagcacaaaccaagccatctagaagcctcttccagtgttttctgggacataaaaacctttcatttttccatcccagtattgcccgacttccaaactaaggctttattagtgataagaagatattgacttcatctgtgttcactgaataacagaacaattcctgtttgaagcatagtttagacattggaaagatctccacttcctctttcatattctgatattagcatagaaatttttcctggtttcaaatttcaaaatttccatattatattttctgattcttagttccaccatttgtttacttatttatttattctgatgatggcgttgtcagagatacttggctagtttaatttctctttaaaagatttcatatcttcttgtctgaacacatttaactgaatcgactagatatgaaaatgaactatttactgaaagagtaaaactttcaatcatgagaatgatatcagataggcgtttgttcctagcaggagagagcagggattaaacaagcaaatattgggattgccaagcgagctggttgaagtgaagtggacctgtagtacattttttggaagctgggtcagcatcagcagtttagagagagctatggcgtttggcttcaaatggctctccagctcccatttgctgactcattctcagtaaggggaagcaacagttttcacatgcaaaaccaagagatgttcaggccaggcctggagatctctcgaatgataagagtgctgagctctgcaagcctgggacctggcttccaactcccagcagcagctggaaaagctgggcaaagttgactgcagtcccagggttggggggtggaagaaggcagatcctgggaacttgctggtcagctagcctggcctacccagtgagcatctggttcagttagaaaccatgtctctaagcaataaggcacagagcagagatagaggtaattgtcacatgtcctgcttggccttgcgagcatgtgcgggtgcaccatacccacacccacacagactacaatacacataccccaaatctcccaacatagacatacaacctgctctctcttttttatctcctacacacactacacacaaaccacacgcacaatatatataccacacacacatgtacgcacatatacacatatactgcacattacatacataaagagaacactcatatatacacatccttccatctccctctatatgctctactcccctcctacatcacacatacacgtaaacacaaactatacatatatacacacacaccatatatctaatacacactacacatgtccacatccatatacctcccacatgccacgcacacaacaaagtggctcctgctagctactcctcatcatttctctgtgttctgaaatttcccattgtagaatcagcatctaacagttttgtaatttgaattaattggactcaattctgttcaacaagagggaagccatacctggtacaagagatctagttaacaattcactgctagtgaagtcatggctattggagaatccacaaccacaaatttaactaagctagtgaaccttcccccccccctttaatttctcactccacatctttttttttttttttttgatgcaaatatacctttcctggctaagaaaatcaattttggagattttgcttgtaacttttgttttgcctacaaatgttaggcatcttgacagtacctgctgtggattggaagtgtccctccaaagactctagtgctgaggacttcatcccaacctcattacactattgagcagaaccaagagttcccaaacatacaggttattgctgttgcccttggattacttggagaagtagaaggaaagtccctcatactgaagaaatgatgcactttagaggcagacccagagatgtctgggctggtgcttactcgaatacctcctgcgcataggactagcattcatgcaaccagaggtacagtgcaagcttcccaaggagagaggtatttcccagtttgatgcttgtgaaccacatcaatgactaatatggcatgagaaccctagggcagagtggtggtacacatatgttcctgtaaccaacagctctttaattggactcaattatgttcaacaagagggaagccatacctggtactagacacctagttcacaattccctgctaatgaagtcatggctattggagaatctacaaccacaaatttaattaagtcagtataatctctaacaacaatctgtaaatatttgtccttatagccacagataactgtagtctttaccctttctcaaggaagcatctctttgcaatagacagtgactactacaggaaagcaaaaccaagcaaaattcagagtaagtggaaacatctacaaagcaccctcacatccaaggctcagggaacactgcagaagataggattgaaggaaggcaagagccagaggattagtttgctatgggattgcgctttctagtaatatcaggaccacacccataaggtcccaccagcatgactgtccaagcatgagttgcacaaggacagcaccagtggacattcttaggtggacaggaaaaagtccatgaggcctcaaccttaggaagagctatgggcaacggaggagagctggaagcaggagacgtggctttccccctggggaagagcacactaattggttgtccaatgccaagcacagctctaaaaacacacaggcagataacatacagacacagcaggctacatttaggaatatttacttgtacgcatatacatgtatgcatacagtaacagtgaaagactaggccatgaatttgaagggatgcagagaggagcttatggaaggttttagagggacaaaaggcagagaagaaatattgtaattatgttataatatctttttttaagagtaaaataaataaataaattttaaatatgagtattgtgtgacccacccccgccctctgatctcatttcttgcttctcttactgcctctttccagccgtatgcatttgtcaaacctgccatagtgcctctgcctcagtgcttggggctttatctgtttcctcaaccttgaacatggctttctctcctaccctgcagatcttccctccggagcacctttcctagtccccaaaacgcaagccactgtctttctccaacatttcaccctactttatttttccttcagaacatatatcagcatatactaataaatgcgtatttactgtttgttttctgtctcctattttaacatataagcttcatcaagagtacaaaatggctgtcttatccagccctgtatcctcagcatcttaaatggttccttgtttcttttttgacttaaaaatcacttatcaatacgtgaagttctccttctctttacaagttctttgagagagtgagatcagatgcaaaacaagcaggtagtattaacgtggaggaaagacataggggaaataataagatgaaagcaaacactggagtggttgtagtgcagtgcagtgtgtgtcaggaaaggatagagcaatcgttatggggaaggggtggagtggggggggggggaatggagtaagtgcccaagaagttttcctaaagcggtgctgtcacaactgactgctcctgaatcccagaatgtctattggttcctggcctggaaactatgtctcatagttccagaaagttccagcagagatcttgcagagatcttaccaacaggagactcacctgtgagattagatgctgagagaaatgcaaaccattcctttctgggttcatcagtggctgcagcctccctgtgcctgtgatgtagtttgccaccaccaacctctacaggctcccgaacagcaggttggatgagttcagactccagcagatagctctgaatctgtaaaaacatctcccttcccggctctccaaacttttcaacagcgtaatcaatttccccatgttaaatacttctccactggaaatatttgaagtgtttttctttactttgtcctgactgaacccaagctgacacccatatgcctcttactgtgcggtcagtatgagtcctgaccctcggtcacttacactgtcaggacaatgcaactccgttcatattctttaattcacattataaattgaaaagcttatctagcaggggagaatgttacattgtgactaccttgaagacagcccttttgaggatggcagatggctcagtttgtaaagacgtcgccttacacgtgtgaggaaggaccagagttcgatcccccacctccacccctacctcaaacccatgtggccatataaaaagccatgcctgatggcacatacttataatcccagtatgggggaggcagagagaggcagctctctgaggctttttggggggagggggaggtcctttggctcttggagggagtagcattagtccagatgaaaagagcttatttaaactgtgtgtgtatttatacacagaactatgtgcatagtaaatagtaagtaaataaggactccttggagttttcaggaactcttactgtttgttttctgctcccctcttctatatttgcctccctgtacatcctttccattcctcggtcagacccctgctcattttttctccatcactcctcacctgcccagtcatcagttttcttccccctcttgcacatcttttcatttccaaataaagttatcttccacctgggaagacgcacatttagctccaccctttaaacccagcacccaccacaccaaccactctgcttctcccttctgagctttaattttgctttcctctgtgataagggcctgtagctacatgacttcttttctctctttatcaaattgcagacacttcctcctgggataatatatagatctgttattcctgaagggctggttgccttagcaacaagggaaatcttagtcctttgagcaaaaccttatcaaaaaaaaaaagaaagaaagaaagaaaaagaaagaaagaaagaaagaaagaaagaaagaaagagagaaagaaaagatcaggctcacaagggactaatagtcacatcatgaaatgtcttctcggctctttctttgctaactgtggtcattctctgactgttaattagaagagcaattaattgaataagctcactgagaggaaggtatgataatacggagctcctcagctgacacactcgacagccccaagtcaccatagctttttggtctgctaattgcaacccagccaatctttatccatacctcacatacgcattcagcggttaggttgaatgtctgccatcccttgagcctggccagtgtccattgcctaacaagccttggcaataaggaagcagaatttggatggagaacagagcgtgtctggttctgccaactgcagtctatgacaaaaacaaacaaacaacaacaaacaaacaaacaaacaaaaacaggtatgtgactccctgaggcagacaaaaagaagaaagaaatgaaaccaaacaacaataaaaaaactatcctcagtcctctcaggtgagatcaatgaaataaattatttaattggttgcaaaagaagtgtttttattaatggtggttatatcttttgggtaagtatatgtgtaaagcttaagagactcatatcaggatttctcagagaagcagcgcgcgcgcgcacacacacacacacacacacacacacacacacacacacacacacacacacacatacacacacacacagaggcacacccttatggagtgatcagctgagactgacttaacgcaggaggttggcacatctgaaagtggtagggcaggcgtgggctggacttccattggctactgttttcactgtcaggagctacgtgctgccaaacctgttagagtctgaacccatctgatccgctgttcaggagcctgtggaggtcaacagaacacacagctcagaacacgagtttggctttgacctagatttgtaagggaaactcctgcttccctgaaacacttcgtgttaaaaagacgtgaagtctcaatacaaaagaaaggcagcggttgtactaaaggtgactgtagtcactctggcaagggccgcatccttcaattactttctcaatgatagaaccggtgttaggtaaaaccactgggaaggctgggaagaaagttctctgagttgatgaattctaatatactttatatcgtgccatcaagctagaaaataataataattttatgctttgacaatggaaaacttttatcatggataaaatcaaaatctgtttaatttgaggacattttggttaaggtaacattttcattaatgggtagggcttacttaaaactgatgattggctttaaacaactgactgaattgggtaaatgacgaaaagcagtgactcgacgagtgggctgagcttttcctggtgtgtgtgtgtgtgtgtgtgtgtgtggtgtgtgtgcacgcactacactcacacatgtgcagcatgttgtatacttgctataacttgtcagtttccccacttgattaccttctcttggacagctatgccttaggtacccaggtaacatctttcctgttacgattgatttgaatatgaagtctcccctcagaaggttcatgcattgaagaactgctggccagctggtggattcaaccactgagaaatggttagactctgcaggatccaatcagctcagtggattgttccacttgatgaagctacaccttgatggcagcgggagacaatgttaggaggcggggtctgcctggaggggacacacccggggacacaccttgcacacacacaccctctctccttcctagatgccttgaggtgagcaactttgctctgaaaggaactgtgactttcatcagggtgttctttttcactttgagcctgagacaatgtagccctctgaccatgcgctgcacctttggaagctgtttctgttcagcgattccttggttatcggctagtgatgaagtatgtcaccaatgtcttctctggatgctggagcccttgtggcaccatgggttccatggctacactaagatactttattcatcagcattgctagagtacagtcctgggtttattcaattaaaggtcagtctaggggttttctggggaagtggtttgtagacataattatttacaatggctggttaacctagatgggacagttgggccacacccagttggttttgagggtcataggaatgaaagttagggatcttgaaggaagaataaatttggccacat

SEQ ID NO: 359 - DNA, 869 bp, Mus musculus
atgttagctcggaacacaaagtaaggaatggctgctctggggtgctaaagctagcccaagataagaaccagaggaaaagctgccatcccatgtcctctgctacaggattttctgtcgagtgaaagatcctggatacatcccaagtcagctatgccttaggtacccaggtaacatctttcctgttacgattgatttgaatatgaagtctcccctcagaaggttcatgcattgaagaactgctggccagctggtggattcaaccactgagaaatggttagactctgcaggatccaatcagctcagtggattgttccacttgatgaagctacaccttgatggcagcgggagacaatgttaggaggcggggtctgcctggaggggacacacccggggacacaccttgcacacacacaccctctctccttcctagatgccttgaggtgagcaactttgctctgaaaggaactgtgactttcatcagggtgttctttttcactttgagcctgagacaatgtagccctctgaccatgcgctgcacctttggaagctgtttctgttcagcgattccttggttatcggctagtgatgaagtatgtcaccaatgtcttctctggatgctggagcccttgtggcaccatgggttccatggctacactaagatactttattcatcagcattgctagagtacagtcctgggtttattcaattaaaggtcagtctaggggttttctggggaagtggtttgtagacataattatttacaatggctggttaacctagatgggacagttgggccacacccagttggttttgagggtcataggaatgaaagttagggatcttgaaggaagaataaatttggccacat

SEQ ID NO: 360 - protein, 135 aa, Mus musculus
MAAGDNVRRRGLPGGDTPGDTPCTHTPSLLPRCLEVSNFALKGTVTFIRVFFFTLSLRQCSPLTMRCTFGSCFCSAIPWLSASDEVCHQCLLWMLEPLWHHGFHGYTKIKSALLEYSPGFIQLKVSLGVFWGSGL

SEQ ID NO: 361 - DNA, 58960 bp, Mus musculus
atgctagtccgccccgaagaaatactcggatgtgaattacacgtgctcgctgcctcagagtccaccgagctccctctggaagcatccaactggcccctgacctagggagaaaaagccggtccactgcaccaccactgcaggaaagagagcggaaagcctgctcatactccgatgggtttggccgccttgctcgtgcgcaggcctcacacctgaatccctctcagcatccagaaagcccgagcctgaaggagttccaccgtcagatttctagctcccgcttcgcaagctccgagtcgccccaagcctccaaacccacacagctcaaggagaccccactccaagactagagtccgcccggccccgcccatcgccccatgtgacgcatgccccgcccacagcctccacgtgacccgaccggcctccgcgcgcagcgtggatcgcggccggagccgccattgttccgccgggggaggacagcgggtcctggcgctggcgccccgacgccgcttagcggccgcctctggagacactctgtccccgccgccccgtgtcctcctggtggcggcggcgtgaggccggctgcggagactgggaacctttggctctccccgtggcggcggcggccctctatcccctactccggcgtgagggttggccgcgatgcgctcggcctgaggtgtcgcggccctgtcgcctcccacgactgttccagcggcggctccgctccccggcgtcatcccgcgagtctctctgacgggagggaagatggctgcacgaagctggcaggacgagctggcccagcaggccgaggagggctctgcccggctgcgggagttgctctcggtcggcctaggttttctgcgcacggagttgggcctcgacctggggctagagccgaagcggtacccgggctgggtgatcctggtgggcaccggcgctctcgggctgctcctgctcttccttctaggttacggctgggccgcggcttgcgccggcgcccgcaagaagcgaaggagcccgccccgcaaacgggaggaggcggccccgccgactccggcccccgacgacctagcccagctgaagaatctcagaagcgaggagcaaaagaagaagaaccggaagaagcttcctgaaaagcccaaagtgagtagtggcgaggagcccggtggtcaagggaagcgagagctcaggtcgaggtggtaggtgaacacgttccttgagaagggggaagtcggaaagtgtaagaaccagtaggaaagtcgcgttttcctgaatggaaattaactccaggggtaggtataaataaaagtgaccaaacttacagccatcatatgagaaccttggtttccccaaaagcagatccttcctagaggcctgtgaaagaaagtaggctgcatgtggaggttaatgggaccttacagtgacgttgggaagttctgaaaagactgcccggtagagagagatgtctatctcaagccacgttgagacctgagaccgtcacggaagataggggtgacctaaaaactggcttaaagaggattacaggtgttcagatcaagccatactcatcttagttggaaatgttaaagggaaatggttaccctgtcttatcctggtgagtgtggccattgggttgctggtacaggaactgggcaaaagggagctggcgatctaatacgccttcgggatatatggccccgagaaaaacataaggcaagtacagcaaagtagtctatagtacagtcaaaggatgtggaagacttttttgttttttaataaagcataaagaggtgacagattaaaatgctgaagaaggttgagaggagatttcaagccgcagtttgctggaccacatgtggaaatgcgaaagctattccatttttgttaggccttagtgttttacttctgtatcctgtgttgtgatttctctgtaatattttgttctgtgtatatttgttggagagatcttgtgccgtggcatgcatgcagaagtcagaggagaacttactggggttggttttccttccacagagtggatcttggggattgaactccagtactcaggcttcttggcaagtgcctttacccactgaactgtttagtagcctgttttgcataatttgtgtaatatgaaagataagtaacattagaaatatttattagtgtagtggtggtggtggatgcatttatcccagcacttggcaggcagatctttgagtttgaggccagcctgatctttatagtttcgggacagcaaggactacatagagaaactttgcctccaatattatctgaatgtaagtctccaccttttgagaacacttcagtaagtaccaggctcttactatgaagagatgtgctctggtatgtttgatgggcacataagaattaaagtcaatcgagtgggagacaggttcgtaaaaactctgttcatggacccataagtactaaatagaaagctgacagctcatatgataagcactcatggtttgattgctgagtgggaagatagaagagaggaaacctagaaagttatcagtataatactttctgaagttaggagaggagaaaacagcacactgagatcatgcataattaaaagttctgtagacagcatcaagggttaagtaatgttttaatgaaagtagactcttcgtttcagagtaaaggtgatcttgaaacaaactgcgtgcattaatactaaggcctgtgtggattgtggcaagttatgaaatttcaaaatatcaaagtctctttaggatgtttagaatttcagatggacctgaggagagagacaggtgcttcgagagtccatttgaagtgcatcatgacacagatgactcacctgaaggaagaacacacacttcactatgaaaaatgtacaacagataggatttggctcatcctgattttcatttgtgttaaggaagggggaatgggtaataagtaaacctacttgagatctttgaggagctggaattgacgttggatcattgaatgtgaattaggtgaaaaaaataaccttctgccacatagtaagaatgtattagagaagttatggccctgaaactttggttttttttttttttttcgagacagggtttctctgtgtagccctggccatcctggaactcactctgtagaccaggctggcctcgaactcagtaatccacctgcctctgcctctcaagtgctgggattaaaggcatgcaccactaccttccggctggtcctgaaacttatgatgcaactcagaaatatattttgtattctagcacaggcataaaattgtttttctttaatgcatttgtgactcacaaaattggtttcttatttgattataaggcctgacacccccatcccaccctccccttagaaaaatactgctttccagggctaagtataaacttcattatttcctgttcattttgtttcttgtactgtgctgcatttttacttaggggaggaaaaaaatcaaacaaggcctacttacaggttgaaagcaaaaaaaggtggtgttttatgtcttactatgaaggaaacatgaaaagtaaaaactctgtctccccagggagctctgtgccagttacaaaagatgtttatacacagtccactccctgtgtattctctgctttcatggattaaaccaactaaggaccaacattttatttttagggcctggtgatgttgctaagttggttagagtgcttacttggcatgcatgacttcctaggttcgttggccaaaactacataaactgggggtcttggcatatgcctgtagtcccaacattcaaagtggagacaggagaatgagactttgaaggtcatcccatacatcttaagcttgaggccatccagggatacatgagacctctcttccccagatcaatgatttttgaaaactgcagttgtactgaattaggtccaggctttttccttgtcattagttccttacctatattgcatagcaactgtatataaaatatgtactttggactaagtataagtactctgacataccaatacttcattttattttattttataaggtacttggcatctgtgcttcttggtattcttgagagttctggaattcctctccaatggatactgaggcgctttattcaaaacaacaatgccagccccactgtggttggggagagggaggcaccaaatgtctaatctcaaaagttgcttttaaagtaaaagattgaatcagattagtgggaaaagcctgagaagtactaaaagctggagaagtcctgtcagcttgagaggaatagggagccctaaatttgaataaaacatttaacctaatctgtttgacttattatatatgtccaaattgaagatcttagttaaaacactgaaggagtctccctttttggctatttgcagtagagtcagtttgaatgcccttaaaatttctgaatttctgagttgtatttcagaccactaaagttaaaaatttttagaattggatctagggaacctgctttcttgtacctgcctgttactcaggatgattgtgaattcctggctgcaagtgctccttgcaaccttagccctgagtttttggcactacaggtgtgcaccactgcctggcttcttttttggtttttgttttttttttttttttttttttttggtctctttctttttcgagacagggtttctctgtgtagccctggctgtcctggaactcactctgtagaccaggctggcctcgaactcagaaatccacctgcctctgcctcccaagtgctgggattaaaggcgtgcgccaccaccacccggctgcctggcttcttaaatttgtattcgtaacatgctgattagtttgaaaaccactcactggaatagaactataaagtctatactataagaacttttattcttttcttttttgtatgcttgttttagagacagtgtctcactatgcagctcccactgtcttggaactcatcatgtagaccaggttggccttgaaatcacaaagcttcacctgcctctaccttcaaagttctgggattaaaaatgtgcaccgctatacagatgaccttgtaattcggcactgaggctagagaattacgttttgaggtccatgccattttgaactggtattcatcaaaagaaaaaaaaaatcttcctagccatgcagtggtggtgtgcctgtaatcataaaattcaagcagaggcaagggagatcttgaattagaggtcagctatgcagcaagactctgtgccgcctcccccccacccccaattttttttttttaagttgagttacttattcaggtggatttagtcatataaactaatagtttctttgaatgaacattttatgtttcaggatattgcctaagtcatgaaaatccatattttcaaaacgtttgtgtgtgtgtgtatgtttgtgtgaacttgtacatgtgtgggtgtagaagccaaaattaatgttgaatgtcttccttaaccacccctttctgtcttaaacattttattatgtgtttgaatgttctgtttgcacataagctttgcttggggccatggaggccaaaagagggcagtggatcccttgatactggagttacaaggggtcatgaacaaccatatgggtgctgggaattgaatctttctggaagaaacaagtgttttaaactgcttcttcagcccccttcttcatcatcatcatcttcttttttttcttaataaagtaataaattttatttcaatttttatacatgttgaccatattcattgcccttccccagccgcccagatcgtccctaccacccaacttcacatactcttattttctgcaccctcaaaaacaaaagggctggaaagatggctcagtggttaagagcactgactactcttccagaggtcctgagtttaatttccagcaaccacatggggctcacaatcatctgtaatgggatctgatgccctcttctggtgtgtctgaagacagcaacagagtagtcacagatataaaatacatatttcttctttttaaatcaaaagagtcaaaaccagtaagacaggtaaataaataacaaaacagaaggtgcaccataaaacatgattctgtttgtggtggctaactactcaggcgtcagggcatggggcctgccctggaatgtgtttgatagaactccattgaagaaaaccttttctttttgttgttgttgttttggtttttggaaacagggtttctctgtgcagccttggccatcttgaaactatgtagaccaggctggcctcaaattcaaaagatttacctgcctctgcctctcaagtgctgggattaaaggcatgtgttgccaccactggctttttgtttcttaataaattatatccatacctactcttcccactccctcaccccctctaagatgtccccaacttcacatattcttttttttttagtgacccactgagtccagttagtgctgcctagatgcactaaggtttgatggtgtgaacctttcccacctaccttaatttaggcaacttatcagtagtcgtgccctgaaagaaaattgactccctctgtcccagcacctgtaaaatgccagtaactccttagctaagagtgaggcctgaaagttcatgccccatccatgagggacttttgagtggcttgatcttgggcaggtaacaaagttactctttcttcgtgagtacagtagccatgtagtgtccaaaagagcatttcatagcactcctcttaatcctctggagtttatattcttccctccccttcttccacagtgctctgttctctgagccttgagggggtgatacagatgttgtctttggagctgagcatccatatcatgtattctcagcatttacttggttctgagtcactttttaaattactgcccgtcactctgatctatggcataaacataaatttttagaaaggcggttttgatatcatgtccctttagcacagcaacagtagtagccagctacccaggctttgactaagttgtcttactgactttgtcttagttttctttttgttgttgttttgtttttgagaaatacaagtggcttttatgtgggtgctgggaacaattaagccttctccccagaaccccaagatttatttttaaaactttgtttttatttgtttatattaagccttttcccccatttttattggttatttatttacatttcaaatgttacatccctatcccctccccatattaagccttttaaatactttttttttaagtttttgagacaggatttctctgtgtagtcttgactgtcctggaacttgctgtgtagaccaggctgacctcaaagtcagagagattgcctgcctgtggcttttaagtattggggtttaaagatgtgtgttaccaccaccttgtgtttgctttttgttgttgttaaatatatttctcaacctatatatttttaatacactggtttgctttttatcccctaataaaaatctagctataggtcttttaggtgagaactgcaggtgctctatctctaaaactgaaaggaaagggttcttttcttttttcttttcctttcatttcatttcatttcgtttttttgttttttgagggtacttttcatttgctggcttttttttttttctttcattctttttctcttctattggcattttaagtaatcattcctttatgtggtttttcatgttgccccaaatcaattcaggttttaaatgagtaaatatattcttcatttaatattttagtctgagtagtgatttcagaagatgtaggatcttagatgaattgtctctagcgttaggaaggttgagaaccactgccataactgctggaccatctctctagcccctgtgcttttagtgtctttcttaggaccacaagctcacctcttaactcaggagccttctgtctcggtgggggtatcctgactcttgagtgttgttgggattgcaggcattcatttgcccccatgcttagctagctagtaaggagtcttttgaaataatgaatttgcatcctgcctaaaatgaacttttcatagcttttatactcaaaatcaaaacctctttccatggcctatctgtcccagcacctgcttttctttcttatttcttatttatttttatatataaatgtactgtagctgtattcagacacaccaggagagggcgtcagatgtcattacggatggttgtgagccaccatgtggttgctgggatttaaactcaaggcctttaagaagagcagtcagtgctcttaacccctgagccatctctccagccacctgcttttctttcaaagccagttggtagcttcatcttatttgctactttaaactacactggtggtttgttgttattgttgttgtctgatttgcgtcttcacaaatgttttcatagttcattgtctttacatgaacaaatgataaagtttctagaatagtctttcaccattagttttatcagcccttagatcttatcttaaaattcaccttagaaagccagaagagatggctaaagtgtaatcccagcatttgggcagtggaagcaagaaggttagtaattcaaggcaggccttggctccaggcaattgactcgacatatatcgaaaataaaaataaacctcagaaaatccttttccaatcactggatttgaaattgttatccccttcagtattctgccttaaaatagattgtttcctttgtgatagtcatcaggataggatcttcttgtttacttttcaaaggttttttccaagattagcctggcctgttagagtgaaaagcaaaccctcctgacgggacaggctttgttgacatgaaatgcctaaaatcacacttgtggttattgagctcaataaatgtatagtttaatatattcccagtagaactaggactgttttaacttggttttgttttattttggtagtggttttgctggtactactgaaaataaatttggatgggattagatttaatacccagcactcacttagtagctcacaaccattcataactccagttccaggggcctacacataataaacaggctcatacacatgacttttttttttaaatcttaaattgtatcatttgacccataggtctatttttctttttgatacatacaaaggattgaatgcaagtctcctatatactacagatgtgctctaccactaagttacaaccctttctttaccttaaagtctacctctggctttaattactagaaggatagtagtaatatggggttggagaggtggcttaacagttaaaggaggatccctgagttctcttcctagcacacacatcaagtgactctcaaatacctgtaactcaagctccacagggtttagatgcctcaggccttcattggtacctccatatgcttacatatacttacagacacaaatgttttaaaaggtaaaatctttctaaataataatggattaagaaacttttaagtgtgacaggagagatggctcactgactgttgttcttccaggggtcttcagcagttcaattcccagcaaccacttggtgactcagagtcatctataatgggatccaacggcctcttctggtatatctgaaaacagctacagtgtactcatatacataaaataaatgaattttttttaaaaaaggaaagaaggaatactcctggtttcacaaaagagccttgagattaagtgacatacttgaggtcataggcaaaaggagtttcatatgcaaaatgatattctaatttccagtctaagaagggcatgttgcattttgtttgattttggtttttggtggtggtggggggtgcttttcaagatagggtttctctgcgtagtacctttagctgtcctggaactctcactgtacaccaggctggccatgaatacatggagagctgcctgcctctgcctctctgcctctctgcctctgcctgagtactggaattgaaggcatgtgccatcactgactatcctaggtcatttgatttctctgacttttttaaaagtctagaattttggttccatttgtttgggtatgtgactctttctttcttcctttctttcttttttaagatttatttatttattttatgtgtctaagtaaatctttttgcatatttggtctactttcatgttattggtccatgctctactttttgagtataagaaagccttggaagctcacagagaccaaactgacaactagggcgcatgcataggattgacctctgtatatatgttacagttgtgtagattggtcttcttgtgggacttctttttttttttaagatttatttatttatttatttatttatttattatatgtaagtacactgtagctgtcttcagacacaccagaagagggcatcagatctcattacaggtggttgtgagccaccatgtagttgctgggatttgaacttcggaccttcagaagagcagtcgggtgctcttatccactgagccatctcaccagcccccttgtgggacttctaatagtgggagcagggactgtctatgactcttgccagcttttgggactgttttcctcataccaggttgcctcattcagcctaggatgaggggaggtgcctagtcttgttacaacttgatatgtcatgttttgttgatatccatcggaaaactgcccttttctaaacagaaatggaggaagagtagatgtggggaagagacagggagaaaaggaggaagggcaaacaattgggatataataaaaattttaaaaagtgtttagagattttttaataatcaagcaaagtagttctaagtttgttatctagtagttctaagtttgatgttatctagggagtttttttatttcttgtgttttctttccaattctactaataattttgaaactgatacacagaatgctaaacttctagaaaccatcatccaaatctagccaagaagtacatagacaatctgctgtatctattgtagtccttatcccagttctcattatgtcaaactgaaaacagtccttgcatttcattattcagaaatcatccacagcataatttaaccatgtgacaggtattgagcatgcacgatacaattaatcaggaaatagtttggaatccctgaagaattggacttagactgggatcttcattactaaatgaagtagctcagactatatggcaaaatttgcaaattgtattatagattatattcataagattgttctaatggttatgaagagttttttttaattggagttgggttttaagatagataaattacaggctgcactgtgtgtagttaataaagtatctaacatgtatcaatctgtttttaaactcctaagaaattatctggaatttgtatcagaattttttacaactaaaagtctttcttgtggagaatacatccagagttaactttgcctgacttcttgggcagactctgatactttcttgtccattaagaaaagtcatgtatgtaaagcctctggtagattctgggcgcaggacaagtactcagaaattagttattgtaaggatacatggattccaacttctctgctgaagttacctcttctgaattttcatgctttacctcttaccatctttctgatgtacgctaacacactgcatgttccctatagctttaacctaagtaaaattttaaaatctagtgaagtagaaacatgttcagggtgacacacattttgaatttcaatcttagtctctctctttgccatcaaactacatagaatttatatacacgagaatgtgtattaatatgtgattatcttcttcaaacactccctctttctttttctttttttctttctttcttgtttgttttcttttgttttgagacaggtctcttactaatggccagtgagctccagggatccttctgttccacgtgccagactgccaaccgtgctgtcacagtggtgggattatagacacatagcctggcttttatattaagtgctggggatctgagctaaagccctcatgatccaccatggcactccacagactgagccatcttcccagccaggacacccttgtttttcagaaagaggaaataagagtactgtatactttttttgttttgttttgttttggttgagacagggtttctctgtgtagccctggctatcctggaactcactctgtagaccaggctggcctcgaattcagaaatccacctgcctctgcgtcccaagtgctgggattaaaggcgtgtgccaccactgcccagcactgttccctttttattttggtgtgtgctgttgtatactcaagttcctttgctatgctctatcctttttgtctgctgtgctgtgcctttgtggtttttggagtgagacattcccacacccacctccacccccagagctgaggaccaaacccagggccttgtacttgttaggcaagtgctttaccactgagctaaatacccaaccccttggagtgagactaatggtatggcatatgttgatctagaatttgcttgctatattgctggcctcagtcctgcttctacctccaagagttaggataaccaacacattctgctaccatgctctgctatttgtaaactactgaagaacagggatcatgcttttctttgtttcaggattttcaggagtctacacgttactctgttgtttactgggtattagttgtaggaacatgtaaataccacataattttcttaggaatggaattttactgtgtaaccttggttggtttggaattcacaatgtagacccagctagccttgaacttggagctctaccaacctccctgtctcctgagtgctgggattaaaggtatgcactgggctagtagtttttgtgttttatcagaaagtaacaaaatatactgtttcttgaaaagcaaaccctacagtatttttagccctagagagaatatgtttacgtattagttgtaatgtattaactttctgaaagaatttatgtctagagcattgtatctgttggatgcatgtccagtaggattcgaccaccaggctttaacatttgtgagattgctagtataaaaatgaccataagtgcttgaatatgagattagggctcatgggcatcatgcttttaaataggaaaggatattagaagtgaggaaactttcttgaacaggtatgttttcacatgctcccatttggtatattctaacaagagccctagaagctaggtacacagttttctcatacttacaaatcatgaagttgggagtgaaatcaagaaaaatgcttaaaaatcagtgattagggctaacaagatagcccagtgggtaaaggtgcttgctgctaacccagtgagctttgttcagtttctagaacctacatagtagaaaatagagaaccaactcccaaaagttgtcttcttcttaacttccacatgttctccctctcctctcctctcctctcctctctcccttcctccctccctccctccttccccctcacacacacacacatttttaaatcacaggttaactgtagctattgaatcttatctcagtttgtcaaattccaaaactcatgctccacttctgtggcaattcctaattgaacttctagtttcttttttttttttttttaatttttaaaaaatttatttattatattcaagtacactgtagctgtcttcagatgcaccagaagagggcgtcagctctcattatggatggttgtgagccaccatgtggttgttgggatttgaactcaggaccttcggaagagtagttggtgctcttaaccactgagtcatctctccagcccgaacttctagtttctaaatagtttccaagtacttttaagttatggtgttcaaattttgtagctaggtataaaatttacatgcctaagtgaaaatagggctcatgttagaagccactccttaaactttataaatgcttacctcagatacagattgttttacaatcctgttaagtaaaggctgctcaaatgaaatagaagtctgcagttaatcattgtaaccaaacggggaaaaaaggaaagttaaataactgtgtgtttcttacgtactttttctcctcctcccaacccccttttgccttgtcctatttttttccttttttaagaagagaaattgttcagatacatagagagatagagcaggctaggtgcattagcacatggcttttaagtccagcactccagaggctagggccaacctgttctatatatatagcaagagccagcaagagttgcacaatgagaccttgtctcagaggaggggaggggaggagaagaggaggaaggaaggaaaaactaaccacaggaaattaaagcagttaagtttggctagagaagacagttaatatgaactatgatagctttctcatatataggcttagcttcttggaaggcaaaagtaggaagtttgtgtatatctaaggatttaagaccagtttaaaagaaaaaagaagtcaaactggtagcacacacttaactctaccttaaaagaggagtgagaaagatagtgagtttgaggctaacctaggcaacatagcaagatttcacctaaaaacaaagacaagatttaaaagattgcctcctgaggtttcttaccttccctttccgtgtactataacacacacttacccagtgaccaggccacacagaagaaaaccaggtcaagagtaaggaaacttggttttgactttcacggtcttattttaacaggttaggacccagcagattaaatgttaattaattaggcatttattcaactatgaaaacagcttttgttttgacttcctgccacaaatctttggaaaacctacaagttgggttttaaaatataaatggtctctgtcttttttttttccttttttaaaaatatttttattttatttatatgagtacactgtagctatcttcagacaaaccagaagagggcatcagatcccattatagatggttgtgagccaccatgtgattgtgaggaattgaactcaggacttctggaagagcagtcagtgttcttaaccactcctcttttaaggtagggttaagtgtgtgctaccagtttgacttcttttttcttttaaactggtcttaaacccttagacatacgcaaacttcctactttagccttccaagaagctaagcctatatatgagaaagctatcatagactgtttttcagttcatattaactctgtcagatatttttaaagatttatttttattttactttatgtgtataagtggtttgcatgcatgcctggtgccaagggaggacataagaaggcatcagatctcctggactagtcattatgcttgtgagccaccatgtgggtgataggttctctacaggaacatcaagtgctcttaactactgagccgtctccagctcctgcttgactgtttgtaactatgcatgtaaagtcacattatagacactttttaaaaatttaaaatacattttttcatacaaaatattatgatttccctttccccaactcattccagccttctcatagttcctagccacccaaatcctcacctgtttccttcttattagtatacttacgtgcattagagagagaagtacaagacaaaagggggttgggaggagagccaaagaaaaagcacataagaaacatacagttatttttttccttcaatatatagctataccatgatgtgcaacttgataaaagtctattctgcaaatattagaaacaaagttttaaaaacttgtacattaatgtactgactttaatgggttgaatatggagaaatagataagtgaaaaggagcaatgcgggattcagaaagaagaatggataaatagcatgggctccttttatccaagtcctcagtctccatttctgttaatagagttcagaattgtaaaaggggggcaagtaggaaccattctgattacaaagtggatttggagatcatagacttgattctgcccacaaacaccctcatttttaaaatgttagggatgaagtaattgttttgtctgtttgtttgtgtctgtggcggtgggatttagccattacactataaaattagaagcaacattagggtcttctagcatgcattgatctgtatatcattgttgcctaatttttttttttttctgctgtggacgagttacagtttcaataaagactatatgacccatacatcctaaaatattttctgtctagttctgtagagaaaaaccaggtcaagtttgcttcccagtacttgggagggggggggggggacagagtcaggtgaatctgagttctagaccagccagagctgaacagagaaaatccgtctcaaaacaaacaaaaaggtttgctgaggttctggacaatgcggttactggttaagatcatgtaccactgcagaggacctgaatttgttttccacactgagtgacttgcaaccacctataattaagctccagaagatctcacagcctcttctggcctccacactaacatgcacaaaatcacacacatgtacacataatttaaacaaaccaacaaaaaacccaacttaaaaaaaaaagtttactgactcttgaatagtaccaaacttatggaaataaaataaaatctagagataggtgttctgagatgacccagctagtggtaatcacaatgtaaatacatttcagagccccttgtcactacctctgtttcctttcctttttctttttctttttcttttctttaattagaggaactactgtgtgtgatcagaaaatgtgtggtacagaattgtttatacattcattatggggtgggggtgggcctgctggagagggctccttttccagaggactcaagttcagttctcagcacccactaaggggttctcgtcatctataacttctgttacagggatttgatgccttctgacctctccagacacatggccaatagacacagggccaatagacatacatgtaagacaaaacattcacacaataaaagtgaataaagacttaaaaacaaattcatttatatacacaaaacacacatcacaaaaactcattagtccagtgagattcagatggtacaggcatatataaaagcaaccctgttcatttgggtcagggaagaatttcattgttgtatatgttatttcccagttataaatctttggttttatctgtcagtcggtttgacattacattgttttcttgtttcctatacagccaaatggacggactgttgaagtacccgaggatgaagttgttagaaatccccgaagtataactgcaaaacaagcaccagagacagacaagaaaaatgaaaaggtaagcttgggaacacatatgtacaaagtttttaataaagctaatgacataaaattatgctttcatggttaataggagtgtagtcttccatttaagaaaactgcaaaatatgaagtagtcatgggtaggttgtaaagttaaagttttgttttgtttttaaagaagactatgtcaccatttttttttttaaaaacattacagtggtgttagtaaatgtttcattgtgcctaaagtcatttgcaacttgagtatcttctgtttaaggttctggctttataggtctgatacaaatcttaacatgattctatcataatagaatcctgttactcataataacgtactttttaatgtaaaaaatgtgtagcaaaattgtccagtggtatcgtttaaactgatttcccttattaggggaattgaattatctacctgctaaacagttgactttatttaacaagataattctatgctgagaggtaaaggcatttgccaccaagcctgaagacctaagttcaattccctagaactcatctccatagtaggagaaattgtcctctggcttccttccacaagtgctcctcgatgtgcctgtgtgcacacatgcatgcaggagtgtgtgtgtttacattcttgtgaagaccagaagagggcattggatcccccaggagctggagttacagagttgtgagctgcctatcaagggcattgggtactgaacttgggtcctctggaaaagttgctctgaaccactgagctgtctccagccctatggagcttgatttttgtacaaagagtaattatatctcaagttataatattgggtgtctttcttgtttaagtctatagagataaaacttggtatagaaaggaaaaaaacacacccatatattttatatatgaagagctagagcaagcttttgtgtatatcagattaaactgccatagttttctaggttggctttatttatttttttaatatatttctcccctgcctccaccttcataatgctgggattacaagtgcataccaccacatgtagttgttttctagatctttgttttgatatagaagcaatcagtgcctcattggtaactagtttctagtagagatcatacagggctattagccaggcactgtgttaaataattactggatagagaaataataacaggtttttatatttgtctgtttatctgtttgggtttgttttgtttgtttctttgttttttgtttgtttggttttgttttttaagatagggtttctttgcatagccctggctatcctgaaacttaatctgtagaccaggttggccttgaattcaaaagatagacctatctctgcctcctaagagctacatatttttaccctcagaaatattgcagtctaagtaaggagaagcaaacaaaggcactatctgggaaggcaaatagagaaacttaaataaaataggttatttgatgccaggtattcaatggagaaaggagaaaggaaatcctactggggtagccagaaaagattgacgtgctggggatgatggtgcacacctttaatccagcttctggaggaagaagcaataaatctcgataagttaaaggccaccctggtacacatagtgagttccaggacagacagggctacatgatgagactctgtctcaaaaggaaaggaaaggaaaaaaagagagaatgctgacttaattaaagatgggtggttttttagtaacaggaaagggaagccagttttggagggagaaaatcaaatgaatattgatattattcatactcaggaaaaaaagccttaaagactcttaggaagtaaaaatgggggggcatatgatttttttctttttaatttacatatatgtaaagcttcaggcagattcatctgtcagcagtatttatgattaatgcatccattttgcatctagaattatacaggtctgaattaaagggggaaatgtgaaaattgctaattagaaaaccagtcataaacaaaatgtataaaggttggttactagtagattattaaaagataaagacaatgatatccactgaaatcctaacatcattcctaatattcattataagaactaacagcattcaatgagcaaaatattttcatattgcttcatcctaataagcaacaccaagggggtgttttatttatctttagtagctaaataagtagctaactatacgagaccacatagctagtaataatacttcaattactctaaggcagcaattctcaaaatttggtcattaaatccctgagaaaggagccctaaggaccctttttggttgaatccctgaaaacaaaactattgtcatagtaattaaaacatgatttgccttttttactatgttggtatttgtactgatggtaccaaagcagtgggtgaaattactggctcctgcacttatgtagcagatgtgcaacttggtcttcatgtgggtccccccaacaactggagtgggggttgtctctgactctgtttcctgcctgtggatcctgttctcctagccttgtctagctttagtaggagagggcccagttctatatgtgcctggatgggctagtacccaggggtcccctcccttctcagaggagaaagggagggggtgggagaggaggttttggggaaggggctagtaggaggggggcttctatcaggaggtaaagcaaatacaaaatttaatggggtggggggagaaaaattactggcttactggctcttcaccatgactcaagacaacagcactgaactatagctgttctttgttcttactgcattttggaagaagaaagcttcctagtttcacttaagagtgctttatgaaggatgtaataaaaaagattgttaatcttaattcttaatctgtattattacatttattttgtgtgtatatgtatgtaggcaaacatgtggtcaggataatttgcaaagaggaattgtttctctcattctatcttgtggattctagaggttgatgatgaacttgggttgtcagacttggaagcaagcacttttacctgataagccatcttaaagtacatggtttttaactgttttgcatggtgaaatgtgaatgtataaaggtatactttcatactggacaacagtgattattttaagaaaaaccacttgtatagtgaatggtaagatgaactaacaacttacctcatattctgtttttctttgaaatgattggctttttagacatgggtatctacctgtaggcattttctcaaaaataaaattattctatcaggacaaggaaaacaagatagcatttactacaaatgataaaaggacctgtcaaatgaaattagaaatgtggaagatttggatttgctgtcatgacattaacaacttctaatacttaacatttctgacatcacttgttttttttgtttttttttttgttttttttttgtttttttcgagacagggtttctctgtgtagccctggctgtcctggcactcactttgtagaccaggctggcctcgaactcagaaatccacctgcctctgcctcccaagtgctgggattaaaggcgtgcgccaccacgcccggctatgacatcacttttgatattataaatatgatttaaaaaaaaaaaagcctggaatcgtggcacatgcttttcatcccagaatttgggaagtgggagcagtaggatcagaaattcaaggatagtttcaagcaagctaagtactagtttagtttgaggccatcttaggctacatgagatcctgtctcaaaaaagaaaaaaaaaatctacaatggaatatcttaccatttcataaaatttgttagtgaaccagtacctttatactatggagtcatgtataaactaggcacggtaatggaagcctttcatctcagcactgtaccagcggacagatctctgttcaaggccagccaaggctacataggacaccctatcttttaaaacaaaacaacaaaaaatattaatattcattcaaagttaattttaatatggtagagtatgaaaggtttttaaagatttattttatgtgtatgggtgttttgcctctgcgtgtggatcctctgaaactagttacagatagtttatttgctaaaaatccttcatgttttctcagcttagaaggcatttcacagttcttttttttcttgcttgctttttatttatttaagtatatgcctgtaaatttatgtgcatggtgtacgtgcagatacatgagaaggtggggtgggggatcccctcccctctttctttcctttcctttcctttcctttcctttcttttaaaggagttttattttgaaaaaaatgataaaaaatttactaaattggtcatgtatcttagtgatgggggcccagaagcccctggaatcttgtccctgggccattatctaacactcttttgcttcttccactctcttactcctgttcgggacattttacaatgagggcattccttttcttttacaataaggacactcttttcgggacctttttacaatgggggcattcctttgaccttaatgtgatacctagcaccaccatttggtctgtctttgagttttctgatcccaaaatttgtcgtcgtagctcccttccctcgagaaccatgttgtttaagtcctgcaagtcggggcatcttggggttttattattgtaaagtgacatctttaccaaggcaactcttaattagagctggcttacaatttctgaggttcaattcatagttatcatggcaggaagcatggcagcatccaagcaggcatggcactggaggagcaaggcaaacagaaggcaggctttcaggcacctaagaggagggcctcaaagcccacacccagagtgacatacttcttccacaacatggtcacaatacctaatagtgccactcactgggccaaacataatcaaagcaccatagcatggttgtgcacacctttaatccttgaactcaagaggcagaggcaggtgtatttctgggaattccaggacagctagagttacatagtgaaattctgtctttaaaaaacaaaaaccaaaaaaaactacatacagccacaatcgaataacataaaattcctcattccccaaagaaatctcatgccttttagtaattacttgttgtttccttttttcttctaatcttttccaaccctggaaacactaatctgatgtaatagtaaggcagaatgctcagaattatctgaagagggggaaaaattctcctcccttctccattggatagatgtctgtgtgagcctgtatcgtagctcagtaatagatcatttgcctaccatgcacggtaccctgggttaaagccgttcacatgtttgtgagcatctctgcattttcttcatggtacacaataaaaacaagttattgcagtaagttggacacagaagtagatagtaaattagttattaaaaaattaaacatgtttgaaatgatgttctcacattgtcatttgatgtgtaaaataccactatatagatatagttaggtagataattgtgattattttgaaataaattagcataactaaataaataagtccttatatccaaaagtattctctgaccaagagatttaagaattgtgaccaaacaaaacaatccagagcagcatgaattgaagcaaggatcaactagaatagcctgtagcaacactgaatgcctcctgcatacacagagtgcttatttgcttacatttgtgtaatgcatgttagaaaatagagtcagaatttaagtaagagctttataagccatggctgtttttcaactatatacacactttaagtattaaatgagtttacctggattcacaattgaatgttagaacaacttatttgcatattttgggtaattcctaaggagattctaagaatttctaaggaattctctaaatttgtcttaaattataagtatgttataatatatagtaatatatactactttatatgatgtgatgagtaaatgtctcatatatatatatatatatatatatacatatatatatatatatatatataaatttttgctgtgtttttttttttttaatgggatcttactctgtagccctgcctgtcctagattcgctgtatagaccaggtggcctcaagattacagttctgcctgcctctgcttttggagtactgggattaaaagggcttggccctctgtgcccaactctgtgtgtgtgtgtgtgtgtgtgtgtgtgtgtgtacatgcagaaacacatatatatttacatttaaaatatacatgtttagcaggtttagaaagaagtcatagtgggttttacaattattaaactgtttctgttgtctaaatctgaagaaaaaaaaaaggagtcatttcaaaatggaaatatcaagtcacaggctggacagcagtggcacatgaccataatcccagaactcaaggcagaggcagcaaggactacatggagaaacactgtctctcaaaaccaaaaaaaaaaaagaaagaaagagagagaatatgaacaagtcatgggccacacaaaagctgttgtctgttgtccatttaactcattatctcagaagtgaagtagtagaacgtgtataaatatatgtgctcatttatgtggacacatttatagacatttctttttttttttttttttttttttttttttttttgagacagggtttctctgtgtagctctggctatccaggaactcactttgtagaccaggctggcctcaaactcagaaatctgcctgtctctgcttcctaagtgctgggattaaaggcgtgcgccaccacgcccggctaatggtctacacttttgtatctgttttgtgtatgtgaaataagaaaaaacaggagaaatttaaatgggatatagtacaaacatgcttacttggcatactgttttttaggatcatctgatgaattaagtatcgttcagatactattggaagtgtttctttagcatctgagcctctgcttatttttgctgttaaaatgagttactcaagagcacattttttcattgtattggcagtggaacactgaaattggacattttgttgaatgtaataaaatctcttattctcttgtctagcaagaagttgctagaaaaaaaaattattgcttatgcacagaaagttaaaacattattggcattcaggaaaggtaatgacagaggactaagtttgtgagttttaaatacttacaaatatattgttctacatatttacaagaatagacaggccctgaatccaatcactagtacaggtggcaggttgagggtcaaaggagaatattggaggaggggggcggggggcaaatggaatgggatttgagctgtatccaaaaagttaatataaatatcaagcattgaacatgaggtagagaaccaaaaaacagttaccctaacagtagctgtaacactttgttcagattcatgcagcttaaagacaaaaatgtataaataacagtcttacaaccaaagtttgtatgtgtgagtaaaggaatataaatgtatattgaaatctgtttatagaaggccctttacatatcatacaaggaggccagactttacaggtgacaggaagcatctacagttgtgtgtgtgcatttgtgaatacatgtatgcttgcctctgtgtgtatagagactagaggtaagaatgtttttttcaatcagttttctcactgtattaatttttttagacatttatgtgtattgcatatttgctttcatgagcttatgtgtattctttgtgtgcagaaacctgagaaaagggtgtcagaaaagggtgtcagatcctctagaactggtgtttgaggtagttgtgagcctccgtgtggattttggaatcagaacccagatcctcggcaagagcagcaagtgctttttagccactgtgccacctctctagccactccactgtattttgatacaagatctcactaaaactggaactttgtttggctagactggctgaatagccagctcctgagatctgttacatgccatcacacccaacttttacataggtattaaaaatctggatttgggacctcctgcttgcacagcaagcactttacccactgaactatcttccaagcagcacgtcttaggtttttttgtttgtttgtttttgtttttgttttgttttgtttcgaaggaatgaagatgaaagaatacactagtatagatttgctggaagttaagcattaagaaggtagcccttactcctgagtgtgtaaacaagtgagtctctttgtgccttttcttctattggtttgccttattcaactttgtgactgtctttgttttatcttaccatgttttattttgctatgttttgttgttgtctcttgaagcatgctcttttctaataaaggaaaaagggaatccaaataggggaaactgggaagagtaggcggagggaaaactatagtcaggatattttgtatgagaaaagaatgtatttttaatataaatagggtaaaggtagcatttgaagatgagaatgtttcctgatatctgtttacttatgtgtttggcagagctgatattcactagcatttagttctctatatttagcttcaaaattgacatctgacacatagcaaatagcttataaatcttggttgtatagagctcattcaagaaaaggctgtttttttttaattgacataatatttgtacctatttatggagtttaataacataattgaatataaatatgtatttgtcaaatcagggttatcagtgtctttcttcatttcagatactagcatttctgtctagagagtacctttgatccctttttcagtagttgttttgaaaatgtatgattaattgttgtagactataattatcattctgttctggagaacattagagctattgccccaaattttgtgtgcttctgtcatcttccctgcacttcataccctgtagtgacctctattctactttatatttccatattactttttttttaagatttatttattttatatgtatgagtatattgtagctgtcttcagacacacaccagaagagtgcagcggatcccgttaaagatggttgtgagccaccatgtggttgctaggaattgaactcaggacctctggaagagcagtcagtgttcttaactgctgaccatctctccagccccttactaactctttaaaatcccccagttgaatggaagcatgcaatatctccttgacagaatgatttcacttccttagatatatatctaaacagagtgttgctaaattatacagtttaacactcctccattgttggtgggattgcaagcttgtacaatcactctggaaatcagcctggcagttccttagaaaattggacatagtactaccggaggatccagcaatacctctcctgggcatatatccagaagatgtcccaactgatacgaaggacacatgctccactatgttcatagcagccttatttataatagccagaaactggaaagaacccagatgcccctcaacagaggaatggatacagaaaatgtggtacatttacacaatggagtactactcagctattaaaaagaatgaatttatgaaattcctagacaaatggatggacctggaaggcatcatcctgagcgaggtaaaccaatcacaaaggaactcacacaatatgtactcactgataagtggatattagcccaaaacttaggatacccaagatataagatacaatttgccaaatgctgaacaggttcttattgaaagaaaggaaattgatcctgtaatctaattgaggcaaatgtgagcttacaattccccagagaaggagaagccctgcaagtaaacggaatcctccattacaagccaagccccagaaaaccatcaggtcaatggtagactctgaccttaattagccattttcccacgccggccattgttttgttttattgataagagagagccattctaactgaggtaaagtaatatctcactgtagttttgagttacatttccctgatgattggggtgttgctcatttcttcatatacttactggccttgttgccttttcagaaatatctattcagattatttatatttttaaatcaaattatttaggatttttactgttaacattgtttggacaagatttaataatctacctgatttcatggtggaacatgacaacaaagtatggttgggagaataattacaagaaagctaagttattgtgtcaaggtttcccctagatgtcttagctgtagtagatctccttaaaagtgtaagacagtaagtgagaccttagggcacaggcctgttatcttagccacatgaaaagccaagacaagaaaaatcacgtttaattaaggcttgcctcttctgctgcagagttagggctagagatagagctcaggggcagaatgttcataacatgaatgtactctatacacaaaagaaggctttgtcagtgagataactgggacaaataactatgtattacatgtttatcttaaagttttacttgaatatttttcagtctcatctgaatgtatatttttggtaaaaaacttttagagatagtggtaaagttaaagcatatttaagtctggtccaaagtggtatttactgacaaatcttagtatactggggcaactataatctatctccccccgcccagtttctatcttttgggggctgtacaacttaacttaatctcagagggtcatggataaggtattataggaacatgggtatccagtggctacatgactgaagaaaatgcctcaccctatccccccaaagaacccattaactataataattcagagggacagggccttgtaagcatctcctcactccatgatggaatgtcgacaagcctcatcttgcacaggttttgtgtagatactgggggttaaagagtataataatcatatcctgcctataaaactacactccgcctcatcttctggctcttgtatcctttccaaaaatcctcttccatgttgttctttaagcccccaagggagtgacacagatgtcccatgtagggctgagcatttcattcattctcggtattttgaacaattatgagtctctgaaataaccactgtccattgcaaaaataagcttctttaccaaagctgacagcagcactaatctggtataaacaaatatttagaaagcacttagagagttacagcgtgtttctttaacaaaaaccattgtagcttcctcactaaagcatatggcctcatcctcaccaccccctttttaatgtttacagtattaaatgtgaattccctcctttggagcaggcctcagatccagtcaaagagattggttactcccataccagttgttcctctattgcacctctcaggcacatcttgcctggcagagtgagaccattgatgacaattctcccccagcagcctatgtagcaccttctagcatttgaaagcaagacagcagaaaggaagctttttagctcacctctaccttgatttgtctactacataaatcattttatctttaattatcattattaaatgtgctttggcaattagttaaactaacagggcatttgtaagtgctaagtctggatttagaattggactttatgcctagtttcacactttataacccatgattgtagagtttctgcaatctccttataacctcaaattccttatctgtaaaggaggaatggttactctagtttctggagacatatactactgattatagaaaccactagccacatgtggatagtaaatactcaaaatataactaatctgaattgagattagatatactgtatacactaggtttcagacaagattagccatgattattccagatatcaaagacttagattcatcttttcatactatctcattagtcattaaatcactaaactatttttaataatagattactcattgaagtgatattattttagatatattgtattaaatgtctaggtttataaactatcttataaatgttaattttatctatacagcttacattatatttatgctaggcagttcttttctaaactggaaacagcagacactggctctcaaatatatcctgatttttttttcatgaataaaattttatcagaacagtccatcagttcacttttatgttgtgtaagcctgaattaatactagagatacggttgtcacaacgctatctggcctttaaagcttaaaacactgacttctctagtctttaatagaccgagcttgttgtttgtgctctggactatagcagctattcaatgtgttaccttttcttgtgaatcgtaatgacagaaataagtagctcagtgaagaagagagccggggaatgactgctaatggagtcaaggtttctatttagggctaaggaatattataatggtagttttacaagtacaattcttttaaaaagtagatatgaacaatctagtaaatataataaagcagtatgctaaacataatacatgataataaaaactgtttttaaagccaaatgcagatcagttatgaagaaaataagacaacttataaaaaatagtattttttacaaatagattgtcgtgtctaaaacagtttttactacatttcacaattcataccatttaagaatatagttgtcccttgatctctgtatggtattagcacctgaactccatgcagataccaatattttttaggtacttaaattccttatactataaaatgttactttatttgtaatatctatcacatatatcctcccatacttttagttgtatctaaattatttatagtacttaataatacatgctatataaatagttttcatactgtattattctgaccaaatgtaatgctgaccaaaaaagtctgtgcttgtgtacaggagcattttattccatgtatttccaaatgaagttggttgaaatggtagatggaaatctcaaaagtgtataaggctgattctatttgcaagttcctcatagataggaaaagcattttgatgccatctattcagttcattcaagctatactattgtttattcgtattataaatatcttgtaattaaagcataacctgtaactttttggtttttcgagacagggtttctctgtgtagccctggctgtcctggaactcactttgtagaccaggctggcctcaaactcagaaatctgcctgcctctgcctcctcagtgctgggattaaaggcgtgcgccaccactgcctggtgtaacctgtaacttaaagatggtatacagtaatgagtgaatagctaatctcagtaagtaactaaatgagtgactgcagtatatgtataaccagatgtttaaggctgggtgtggtggtggtgcacacctataattcaagtgtgtcaatacttatatataataatatataataataattccagcacttcagaggaagaggcaggaggcttaggaatttgaggtcatcttctgctatatttgaggtcagcttagggtaaaggagagcttatctcaataaaacaacagcaccaaaaccctactatattgttaatgttgtttcttttctggagacatctatataaatacagaaatcatgtgtagtttttggcacacttttgaaaggagaatataaaattagcagtaaggagttggaagactgttccagaatttatgtatcttgcgttggtatttttatctttattgaactgttaagcatatacaatctgagggtttttttcccaccccgctttgaccaaatactccctgctttatacaattgattagtagtacataggttatcagcaatatatcttatgcaatcaaaccactatttggtacataattttcctttggaaaatgatggtggattgtaatttcattgttcctagagcagcatattacagtattctatttctactataatgtaggacacattttgtgtaagagcatagtgtggtttggagccaagcaaaccttcaattttaactttacttactaaatttaacatgacacagtagaacctattctacctttgttttttcatatctaaaatgggttaataccttctgtatttttaaagaataaattagaagctgggcagtggtggcacatgtctttaatcccagcacttgggaggcagaggcaggcagatttctgagttcgaggccagcctgatctacagagtgagttccaggacagccagggctatgcagagaaaccctgtggggatgggggggggaggtggggggggagaataaattagaaaattactgtaactagcataaagtaaccaatcactcagttctaacctctcattgctaccttaatacactggtttttttaatcaaactgaaatatcttagttgtcagtttcatacatttcattatgtattttactggctcctactttttctaaaacaagtaatactctattttactatttcagtcaaagaaaaataagaagaaatcaaagtcagatgctaaagcagtgcaaaacagttcacgccatgatggaaaggaagttgatgaaggtatttgagcaagggaaaggcctatagaaaatatttaagtttttaaactgaggtgtgtggtataaaagctccattgtttcacttaatcttgtatgtaacactttttaattgccataaattttatcataaagatctgtgacgttattaagaaacactttggttatctaaatcattttagcatctaatagtgcttatttattctttaaatttatgtttgctcaatattgtgagcaattgagaggccattcatcttgtctttgtttcctataaatatggtttggagtttcccatttttcttaaatataccattcctaaaaggctatgtgcaaaattcttgaataagccatttattatcacaccctaaactcatgtatcaggagcatataactctcctgtcacttctacccaacaggataaaaagataagagacaattcttttctgtcactttttcttaactgtagttgacacattttgttagaaacaaaactagaataaaaatagttttttttttccctagtataacatgagattaggataaattcttagggtaaattaatataatcagcactcttggtttttagcttagtatctaaatttattatatctgtcccaccctatttttttccctcaaactacaacttttttgtcttcccctactgaataacatcttttttctcgggctatgtcaggagcctgggaaactaaaattagtcacagagagaaacgacaacagcgtaaacgtgataaagtgctgactgattctggttcattggattcaactatccctgggatagaaaatatcatcacagttaccaccgagcaacttacaactgcatcatttcctgttggttccaagaagaataaaggtatattagtggaacataagagtggtacatcaaatcaaactcctttaagccagatgtacaaaatatgtcacaatctttttgaactgctaactttgtgctgatatacccttcttcatgagagttttgtgaaccacatcctggtttaccatgtaacagcagtgttgttaatattgcctaatgaatggcttattaaattaaaatttgcctttctgccttgagtcacattagagaatgttgttgctgcttttccttgtgtgtgttgctttgccccaatcctcttacatctccatttcttacagtggataaaacattgattaaatggaatatttatcaccattctgcatgttgggcactttcattccaagatgaaacaagcatgttctggttagtgcaggttctgtctatccaccccagtttttttgttttgtttctggcaattctataggtattaataaagctaaaccagaatttcaaagatgattgagccaatgtccttcctaccaagtactcagatgcgtaagcaatccaatattgatagctacttcatgggagcactagtttatttcctttgtcttttgttagtgacctcccttttttctatcccttagttgttagcagatcaccttcttaacctcgtttttgtttttttttttttgtttgtttgtttgttttgttttgcctgctgacttaactgaaattgttgccatagtacagtaatgaactttccttattcattctgctgtcatatattatcagtgctttgatggtgactcttactgatttgggcatgcctgccttgcttgcactttgtgtttcatgggatttgagtttggtttggttttggtacattgtgataattgtgcttattttgtgccagagaattggaatttttatgttaaaacataaattctcactttttaaccatatttcctatgttataatcccaaatgtggcaacagttttcttaaattggtgtgcttgcttctgggattattgaaaaggcagctcatgttaagatgaggcaaagttgaatccaatttcagagctcaatgtttcagttcctacctaaaagaaccctcagaattcagaagcattgcagaataatggtcccttacttgtattttggcaattttctaggatttggcattttaattgattaaaaagactcaattccctgtgaacatgtgaaatatgttgtaaaatcactttttccaatgtcaaaactggcacttgaaggagcaatttattatagatcacaattgtatgttccacttgatttaatgtgcacagtagcctgtttagtattaaataaattttatttctatttcaacccaggtgattctcatctaaatgttcaagttagcaactttaagtctggaaaaggagattctacactgcagggtgagagaaattacatgacacttaacctgaaggccaatcaaaatagaaacttgactacatgtgtctttccttatatgatgttaaaggaaagaaaagggattaaagatgtttttaatttcttaattaatatgatcatagtccagagaatttgaaaaatggaaaaggaagatcattcacactcggagtttggtatgttgtagctccacacacacacagatataaaaacattcagtagtaatttatgtacagttttgcttcttgcatcatttactccaagagagaaggatctttgttggacatgaatgtaatatgggcatgtttgggataaaagactattctatatcttaagaaaatgtagttcctataaattttaatggcttccttgatggtatcaaatatgttataatgaatttagtttaaggttattgagtgcttcacaaacaaaattaacctaatttgctcattattcatcactgcaggaagagcagtataccagcctaaaagcaaaagtgtcacaggaaaagtgtcaccttctcattttgtgcttgttcttttttgtttgtttgtttgttttaagatttatttacttcgtttatgtgagcacactgccactgtcttcagacacaccagaagagggcattggatcccattacagatggttatgagccaccatgtggttgctgggaattgaactcaaggacctctggaagagtcagtgctcttaaccactgagccatctctccagctctttgtgcttggtcttaacaccattgcttgctctatgccctcatgcctcatatctcaattctggctacccatctcggaatcaatcaatcaatcaatcaatctctctctctctctctctctctctctcacacacacacacacacacacacacgcacacacacacacacactcacacacactcactcaaagcctagactctatccttgaggtcctgacattgatttggtcttggctgatgccatagagtctctttaaatttctcatttggttctaatgtgcagtcattatatgtaatataatatacaaaattatatcgaagggaagaacatgtaactaaggagaagtcttcattttcatagtgggtgagtattcagagtatactagatatgtgttttcagttagtcattttgctattgagaacatcactagtatgcattttctgttgacttttaaattaaggaatctgttagccaggcattgtggtgcatgcttgtaatcccagcatatcgagggagaggtaggggaaccatgagacttatgtaagctacgtagtgagaccctatctcagaaacaaactttaaaatcatgtaagaacttcatagcttaccttcttatactcaggctacttaaaggacactaacagggaaggaaagagtactaagtactgataagctgagctatcatagaaatacagaattaccccatttttttaacaagaaaccatatatctgtttttaatctttactttcttttaagtttcttcaaggctgaatgaaaatcttactgtcaatggaggaggctggagtgaaaagtctgtaaaactctcctcacaattgagtgaggagaagtggaactctgtcccacctgcttctgcaggcaagaggaaaacagagccatcggcttggactcaagacactggtgacactaatgcaaatgggaaagactggggaaggaattggagtgatcgctcaatattttctggcattggtaagaacttttagaaaaaaaattgtttaaaattggtaatgtgatacagcttgaatttttcaggaattgtgaaggaaagcaagccattaatagaaataatcctaaactgggcatgttagtagtgcattcctgcaatcccaggctggaggatcgggaggttagcctcagtgccataatgagttagagaatagcttgggctacaggagatactgtgagagagagagacagacagacagacagacagacagacacacacacacacacacacacacacgcaaagaaatactagtcttgccatgcagaagtaatagtgataattaacttatcttagattctttgcacagaatagagcaactaacatgactaacatcatttactttctgtgtagtgctttcacattcttgatcacatttgctcatcagtagagctaactgatatacttgtgtgatattgatatatttttttaaaggtttatgtatgtatttatttatgagtacactgtacctgacttcagacacaccagaagagggtgatggtcatgagtcactatgtggttgctgggaattgaactcgggacctctagaagagcagtcagtgtgctcttaaccgctaagccatccctctagcccataattgtatattcttagtgatagcattaatgtaatgtgtgagttgacatgatagattttagcagtttgaatctaaataaaaatagtaaataaaagtactagagaagtttatagcatccattttatagtctatacatgcctgttataattatttttccttagattttaatggtaaaaattagtacctagtagtttgtttctactgaaagttaaactgaacatgcagttttttctgatcttttaagcaatgtgtgcttattatacattatagaaaaaaatctttattaaatatggaaaattataaataagcaaagggaaacatattatcataccacctagtgacagctgcagtttttgtatttgtttttcttcctccactgtgtataatttttgatttttacaataaactaaattgaatatacatttttatgtttctttttccccatccccaaattgataagaaaggttttacttgttcttataagcatgcttacttagtggcactgtgtgctagctatatcgtttaatgtaatatagttcacttacctatttatacctagatctgtagcattctgtatctgactttaaaaactatttcaggtaattttacatttagtgtattttttaggatagattcttgggaataactggggttaaagagaatatgaatgtatttagtgtattttcatttattatcatactttcatcttcagtgtaagtgaccatttatcgtattcttacttaccaaggttgaactttttttttcttagtcttctgttttgataagcaaaaaaatgcataaattattttggttggcttttaaatcattgatgcaagttaggttttttttttttccatgaattaactggtcatttctacatctttcaccaattacctattcatattctttgctgtttgtctagtggccttatgcttcttttttggctttttaaatttgaactaaaaaaaaaaaaagccgggcgtggtggcccacgcctttaatcccagcacttgggaggcagaggcaggcagatttctgagtttgaggctagcctggtctacaaaatgagttccaggacagccagggctacacagagaaaccctgtcttgaaaaaaccaaaaaaaaaaaaaataataataataaattaaattaaattaaaaagaattatataattccccgtacagtaaataattttttattttatttttcaggagtttttattttgtcagagtcactatgtagccctagctagcctagaagactgtttgtttacaaagctggcttggaactcatggacaattcaatctgccttctaaatgttggaaataagagttgtgagctaccatgccatactttgaacatgcagttttttttctgttgtagttatggcagatatttttaataccttagtttaatttgggtagtattgaatactaggaagtgcttagtttgtgaggaaaaacaaaacacccacaatgtcttccttagctattagctttccatcctatttaaaagactaatctctcaacaagcaaattgtgattcattcactaattctgtttcaagttgctctcctcacctgtaatgtccaaaactatctagaaatacaaaagtcttgtctacaaagataatctctaaattcctaccatcgttttcaacagaacaaaattgccatactaaaagtatcctttcatatttagtaaaagaaatgatcaggttttatggaataatgttaggaacactgaccttgtaatatatttctagtttactatagaagctttatagttttactattagagcatggatttaggtagtgtttggttagtattgttacagataaaattaggcagcaaattagatagatgggctttttttagctggatttaaatttttgttgaaattgaaagagaactgtattaagtttatgatgggtcattgaggaggtgtgtatgctgtcatgctgagtaacaagccaccttaaaaaatgcatgcttggtggcttgtcattgtgtaggcatcatggcatgtacttacacactaagaacctaggctgtcactaggtcagaaagtctctagtgctacatgcttatgtagcctactattgaccaacgtgtcattctgttttcagaaaaatactttgaaaatattaaaagatagcatggtatagtaaatacaaatagactagttcagacagacctgttaggagtgtgtgggcatttagttatatagcctgatgaacctcatagttaagtaattttgagaattgattgtaatgaatgtcaggcaccaagttggtgcctagtgtaaagtacttgcttaaattatgatagaaatgattgtatagtggaacgagtaggcttggaaacagttatacctaagcagttttctaagtattggcaaatcattttgctagctctaaaatgacctagcggggttgctctaaggattagaactcagtgtataaaagagccatccacatagtagacactcagtaaataatagctactgctagaatattagttctcatttttttaagataatctttaaatattgctatcatagttttaaatctgtacatctttcaagttctttgcaaattgaaggttgcaagtgacgttttttattttgccagctgcttggtctagtgtggctagggggatgagtgcctctcaacagaactctgcttcttttgcatctctcacacttaactctgctgtctctggtatgtgaaaacagtctttcgttcagttaaccaaaacatttttgtttgattttagtacttattatttagaaaattgattaacatcatatattgctatcaacataattaatatatataatagcaaaggtctttttaagttgtaggggacatctaagtccttatatgccaatgatatggattctgtggtctaccactggcaatttattagtataaatacacctggaagaccttccctttaggttaggacagtagttcttaatcttcctaatgctatgaccctttaatacagttcatgttgtaatgaccccccaactataagattattttcattgctacttcatatagctgtaattttactactgttatgaatcataatgtaaatatctgtgttttctgatggtctatgaaagggatcatgatctacagattgagaactgctgggttaggacatgcttagtacactccaccaaactttaagttgaatttagcgtatttctattcacttgttacgagtttataaatcagcctctctttgacacacacacagtagctgttttagggacctgttgcttcagtgcatacactataagccatcagcccagcatcacttaaatggataggtctcttattaatcagcaggagctacagattttatcaaatatataagtagggaggcactctgattcacaaagtttcctggacttccttcataatgatgttatttcatatgtctggaacagtagcctagaagcaaatagtaaatagtttaggttttgtgggccacacttgtcactgccacaactatcaactcagctctcccgtgataacaagaaagcaatcagagatcaaagacaaataagtatattgacttaaaaacactattcatttgaccttttcttcagccatttaaaaataggaaattttctttggttaatgggccaattatggttggaattgacctacaaagtgcagtttgttaactcctcgtcttgttgaccatatttcatttccagaagagcaagttcattatttccttcattttatgactatgcagcacatacattcagagaaagcagtaggagctactgaagtaatgaggttatatttatgcaacttgagtggctaatatactaaatattagccacatttgtagggtgatgtgcttaattttacattaaaatatattaccattttgagtatataattagtgaaatatcagcaatccgtctacataactaagtggaaatgtaataactaagactataaggtaatgaagtgattgttagttttatttattctaaccaggaacctgtatttcttaagtttttcctgtcagtggctctgaatccaagtgactatcagagtcacctaaggactctttaatgcgcatgaaatttggattcaaaaggtagcatgtatatgtgtgtctctgtgcacctgatagaatgctaatttgcattctaaaatttgtagccgtagagcaattggttttgaccttacattcatggacttttatgcccaactattttcagatttttgcataaaaagttctggacattgggccaccactgctttcatccggttcctaagaaaccttgtaacccctccccctcatcctttttccaacaactaaacttagaaaataatattcttttcttttcagtgcatctgaacataactctaaacttccagcaactcttgtttctctgacttttctctgtcatacctctggttaattctctttctttaactttctgtggcctcagagttgagctaactcagacatttctagtggtttttctgagtcccgaggatatccgcatccccgaggcgtctagcgatgaggctgtttgctttactgcttcacctttaagaagacaaatggagcttttttctcgacattttaatttgcagacgacaagtcagattctaattgttgtgaaatggtggtggtgttcagatctagttatattatactcaatttaaaattgccctcaattttacttttacttttcatttaactcttctgttatgtctaaattttcttttaggagaaataagaaatagagtccatgtgaaaagtatagaacttttgttgtgaaacatccttaggaagttccatttttaattttattgcattcgtttttcatttaaggatctactgctgagccagtttctcagtctaccacttctgattatcagtgggatgttagccgtaatcaaccttatatcgatgatgaatggtctgggttaagtatgtccttttaaattttttcagttacttctctcagaattttctttttagtaccctgaattcatgctttatgtcttaattttaatcctaatttaccccttttataggtcatagtaatataatttaacaccaactgtatactacttggaacttgactctgaatacttatggaactaaaactaactttctctaatgactaaggcggtgttagttttattagttctataggactaattttttggtttcttttctgttttaaataaatagttttattttgctggttttagtataaaagaagaaatagacaatagctatggctttgaattaattgtgatatatgcacatttttgtgctagttgacaaccatagcccaatttccaatagaaacatatgtttaaaagaaataattttaaaaaggagggagagtgtgtgtgtgtgtgtgtgtgtgtgtgtgtgtgtgtgtaacctgggcattgtggcaccccattgtgccaggaaaccaaggcaaggctgattgatctctgtgagtgaaagggcagtctgatctatgcaggagtgatacaagatcctgttctcaaaataaaagttaaaaaaaagaagaagaagaaaattgtctccatattaaaaaagcttactatcttcatttaaaattacgaacttataaggttcgcccacctcccagaactccaaatttcagaatttattctttcctctgaatttgtatgtcatattctttcctaccttgcatatattctgtcattttgctccctattttagaaaagaaagtatagatttaatgttttatataaaagtttttaaataattttttaaaattatcttctgggtgttatttttttttctttgacttttttttaaatgggttttgttttggttttgagttgaaacctcctgaaagaaaaacttggtaattcttatatatatgtgtagtgcttggggtggggggtcctaactaaataccccttgctagtctaggactcacggtgatccatcttcctactgtgcttcccaagtattggaattaaaggcaggcaccacagtcccagctattgcatgcagttctttgtagaatgtttagtgtactgtttgacgaaagtaatgatttagaagtagtaatggtgatgaaagtaagcacaaatcatttgaccaggactggttccagatttctgcatctcacttaatacttcaaacaggtgtattaagtagatgcagtttttcttcacacttttcagataaaggaattgaagcaaaaaaaaaaaaattgtaactttctacaggctagttaaatggaaaaggaggagattcaagccttgctggtcttgtcttataccacttgttttcattaactcctgcttgttacagtcacagtgaaaataacaatcacaagacatacatgtagcaaaatgccacaacacgtaaaaatatataaatggaaaaaataaagatagttaataatcatcatgaaggcaagcttgtaacacagtgaatgaagcagagtccttaaagattgagatggggttagaaagatgattagagaggcccatctccaaagatgagatcaagactgacttactctgtgtgcgtgtgtgtgttgggggaagaggtgcgcacctttaatcccagcattttggaggcagaggcaggaagatctttgagttcaaagctagcctggtctaccaagtgagttcaaggtcagccaggactaccatgagaaactctgtcttaaaaaacaaaaacaaacaaaaaacttgttttgctgttgtgttgatgtttctcactttgttgcccagttggcatcaaattctcaatccttgagttctggaattacaggtgtgtaccacgattcccaactaagagtgcttgcttggaaagtttagttttaatcctggatttagaatagagtatctgccaggcagtagtggtgcacgcctttaatctcagcacttgggaggcagaggcaggtggatttctgacttcgaagccagtctggtctacagagtgttccaggacaaccagggctacacagggaaacctcttggagaaaaaacaaaaaaataaaataaaagtatctatattaaactataaaatagaacaaatagtttattctgcatactttgaatagttttgggaaaactttaaattatattggtgtataaggatgcaaaagcatgggttttcaagacaaaataatctatgctgctttaggaaaaaataactgtgtctacagtaaacacaagagagtgattacaggagagcaccagtaaaggatctgggctgctgagtgttaatgagagcaccgcacaagcagccacaggtttcctgctggacattttaccttacctgtacaaaacttttaaatatgaaaaaccatcattggctgctaaagaaatagtttgataaagaaagaaaaactacatataaaagtgtgttggtaggattctagatacttaaagcaagtgtggtctgggaagatagtttagaggataagggtacttgccttattacaacctgagtttaagcctcaaaatccacattatagcaaagaaccagttcctacaagttgtcctctcatttccacatacataaacatgaatatacaaaaaatgaattactaaataaacaatcttattgggaggggttggtcctggtgggtctaaagaagtggctcaggggctaagagcatttgctgctcatataggagacttgagttcagtcccagcacatacagaagggcacacagctatctgaaatctagctccatgggatctgataccctattctggcctccatgggcatggcacacatgcatagacataaaataaaaatacagaaaaatgttggatgatggtagtacacaccttcagtcccagcactcaggaggcagagtcaggcaacatctaacatcgaggccagcctggtgtataaaatgagttccaggacagccagggctacacagagaaatcctgtctgactcaaaaaatatgttttgttttgtttttttagaaagctaagtgtggaggtaaatgagtgaaatccgagtagttgggaggtagaagcacttggaaggaagagacagaggatcagggattcaaaatcttttcttgattatagtcagtatcaagttcagggccaacctgaacaagatattattctaaaaaaattttataattaatatataagaataacttttttatgttgtctgtgctatattggcagtgttctatgtccacaatttctttttaacttatgttctctgaattttattttggtgtatgtatatcatctttaatgtgtctttttttaactcactgaattattatactcattaattattactcctgatttatagaatgaaatacaaagtatcttatagttggttttaatatcagcttgccacaaattagaatcaacagtcctctaattgtagggcaacacttagtccatagggtagggtggtttaatagtccgaatctggtgccagaagcctggaatgttcctggagagtctctgacctctcgtctgagatgaaagcttggaaacatggggtctgctgtgagcgaatgttggagcagcagcagcgggacaaattaacttggtgacaaaagaaggtcaagtgagcaaaaggctattcaatggagtattgatactgtgtttaaacactggagagtgtctttcaaacatagctgtgttttactaaatcataaaacttaatgtttacgggagttctgttaaaaatagttgttccccagattgaggctaacaatgctatacttgaacctaaaacattccacaagagtaaatgaagagagaaattccttacccatatatatattatagctttttttaaaaggcattggcagactggtttaaaaaaatgtggtagggaaattatcctgtttaataatcccagaggcagaagtattgtgagtttaaggctagcctcgtctacagagaaagttccaggacagacagggctgttacatagtcaagggtggggagtggggtaggctatacagtatgacttatgtttaagaaaactgttgaagaagttcattagtgatggataaagctcattgatagagggcttggcttgcctagcctgcacaaagccctgtcctacaaaaacagacaaaaactacatagtttgttaacacagtaaacctttgaatcttgagcattgtcattggaaaatctctgggtagtatttggatttgggttattaagctgttaagtagcttttgtttgatcacagttaatgaaaaaattactctctactcagtaagcaaaaaatagcataggattttatgtagtcaccacagatttatgcttctgtcaatgtttttacagaaactgaaccagagagtgcagctattttccaggcttgaaagctatctattctatgccttttgaaaagtaattcattaaatattaaattagatttttatttcttcccacacactctataatattcattgaggaaatgtgtcatatgttagtagtatgctgtatatttagttgaactgtacttgatagtctcttttctggaaatcaatcttagagatgagactaatggataaagttaccaaaaatatattagaggtgggatgtaactataatgggcaaggccctggaatgaattcctagcatttaaaataaagaacaagtgtatctcatagacatttctcagaaatccaccggttttaattataaatgcctaatgtcatcattgatactaaaaacaatagctgccatttgttgatttgtttattatattgctatgaactactgctttaagtgtatcttatatcatcttgttagcattccatgaagtttatttagagctccttaatattaagaaacttagccagggggctatagagatggctaagcaattaagagcataggttgttcttctagaggacccaggttcaattcccagcactcacatggcagctcacaactatctgtaactccagttctatcagatctaacatcttcacacagacacacatgcaagcaaaacaccagtgcacctaaacacaaatcaggaggcagtgtgtgggaggactaaaccaggcttgatggtgcacttgaggcagacacaggcagatatctgagttctagaacatctagggcttcacagagaaaccctgtcttgaaaagaaaaggaggaaaaattaagcagtgctgtgccacattgataaaggtttattaatgaacatttgtttgacaatgaggtccatgttcttaaccgctatattaatactccaaagtactgactgaatattcatcggctcataatacatgatgatacatgttgagatggaagaaaagactgtcttttgtagcacacttcacccttgtaatcacttgttgcacattttcttgacaataagctctgcttactttgggacttcccactcttctattttcacagtcccctgtggtaaaaatatatcattcttttattatgcttacatatctccactgaatagttagactgttaactccatgtgagagtggcttctgcacatgtcttaaaactcttggaccaacttaactctggttctactacatagttagagcttactaactatgaggagaggaaattggcaatcctgatagaatatatttactattaatgtgtgtcttcttcacataagtttgggaacatactatgcagaatcttttggttttgtttgttcgtttgtttgttcgtttccctgtgagcattctctcagatcattctttggttttctcagatgtgtattaaagcttttgtgaagatctgtgagtatctctcctatgaacaaaaagtttacctgggaaaattaaaatagcaaaaagtaacaataagcataaaataggcatatgtgcctccttgttgctaaaatgtgtgttcaagtcatgtttagcattattcttggaacagatcagtcgaacggtgtagaaattccagaagcaatagagtgcatatgaaaaaacctgtctcaaaaaaaaaaaaaaaaaaaaaaagaaagaaaaaccttagtatttggtattagtagcattaaaaaatggtgagaaattgatagactccttatagttaaacaatgctaggaagacttattgaccactttgaagtaaagtataatctctgtcatcttaaataaaacttgactgtaagtggatactataagaatgtatgtgagagtgaatggtttgccgagaaagagggaagcgttaacttagccaaagagaagcaaaggcttgtgctcacctctagcatagaccagtgatagtttcctaagtaaaatggcaatgcctcaagactgtggtgacgaaaaccctgcaggtgactcggatgcttttttttttttttaatctaaaatttacaaatataatatacaattttaacgattgaaagccaaacacaaagattgcaaaagagttatctcttaaataagtgttaatcgtaaaattttaaaatagaaaacataatgtcctaggcatgtgtattggaatgctctagaggagcagagccaactgaataaatatatattcatataaaaagggatttacctgatttatatcagatgggctggggaatcctacaatggctatcagcacactggaaaggctgagaacccagaagctgcttagtcataccacgaggtgcctcagcagtcctggtatagcactgaaggcctagtggaatcctggagagtcactggtctgtagtcatattggaaggccaaaggtcggatgcttttagagtcatcagataagaggcatttgaatcatctgaaaatgttaggaggctagaagtattaggaaagggaagggaaggggaacgggaagaaaaggaaaggaaaggaaaggaaaggaaaggaaaggaaaggaaaggaaaggaaaggaaaggaaaggaaaggaaaggaaaaaagaaaagaaagagcttacatagtctgtcatgatttggtaaacctgaagagcctgatcttgaaaaaacttacaaggatgggacaagtgtattatgagggtatataattttggtactattattaaataaagcttaattctgtaccctaaaaaataaattggtataaaaatatggccaggttaaaaatagacagaggaaaaagtgaagattaagaagactgacaaaggagagtaacattaataactaataaatatgttttgtggtatgtctaaaaattccactaaatcttgtgcttagcaacatttggacaatgttttcactttttcctagctcttaaaatatgctcagggaaaagaataatagtttaaaactacagcttaattccatataaagaacttttagtgtttggattttagcttctggcaaaatgacagataactaattgaaattattattttttagatggtttgtcttctgctgaccctagctcagactggaatgcaccagcagaggagtgggggaactgggtagatgaagatagagcttcacttctgaagtcccaggaaccaatttctaatgatcaaaaggtaaatacttgttaaagagactgaggagaattctagggcacagaggcaggcactattgagtctcagaaaggaggtggtattgaacactataagaaacagagtggttagacctaaagattgtctgtgtacttttcattacaaagtttggaatcagggttgagggtgtagctctgtggaagagcatgtgctgagcatgtacaaggccctgagttcagtcctcagtatcaaaaagattaagagaatcctggacttaaagccatatttcataaagttaagaagttaagagattattattagggtttggagaggtggctcaagggttaagaatactggctactcttaggactggatttgattcccaacacccacatggtggcctacaaccgtctgtaattccagtcccaagttatccaacacctcagatagagcaatgctgcacaagcaggtaaaatacccatccatacacataaaataaataattttctttaaaaagaagtattagcaaacaaggttcaggaggaaaagtagatagaactggaggagaggcagtgggtgacagtaaaacacagtaggaggaaggatggggggtgaggatagagattttagtgcaggtgtggcagactagctaccgaagagccatagagtctaaggaagccctgtgttctgcaggtaagtttaaacaatataaaattgaaatttgcttgtataaacatatgtggaaagggctggagagatgaccatacaagcatgagcatctgagttcctaaatgcccagaactcacatgaagccacacctggtagcacataccttttaatccttgtggtcctttactcagatggaggtggagacaagaatcctaggaattactgagccaagtaggctggtatacatgacattaaacattaaaaagattctgtcttaagatgggagacaaggactctttgacctccccccccccccatacatgctacaaatgggcctatggtcatacaaacacagatgtgcagacatctgtctgtatacacacagcaggaaggaaaaactgtaggccttgagataggctataatttactgtccactgcattattatatatgagcaaataaagtcaagaataaagtttgagatctagagagtggtgtggatgtttgtgtgcagctcagctgctcaggggtagatcccttgcttagtttgtatgcaaagccttgcgtttaatcctttacactgcaaagaaaagaaaaaagaattccatatgccagcaagatttagctgacaggaccctcatatagctatctcttgagaggctatgccaatgcctagcaaatacagaagtggatgctcacagtcatctattggatggaacacagggctcccaatgaaggtgtagagaaagtacccaaggagctaaaggggtctgcagccctataggaggaacaacaatatgaactaatcagtacccctcagaactgtgtctctagttgcatatgtagcagaggatggcctggtcgggcatcattgggaggagaggcccttggtcttgcgaagattatatcccccagtacaggggaatgtcgggcccaggaagtgggagtgtgtgggtggggagcagggtcaggagagggtataggggacttttgggatagcatttgaagtgtaaatgaagaaaatatctaataaaaaaagaaaaaggaattaaagctatattcaacaaagtatgaatagacacttggaaatgaattaatcagtaagcaaaagctgagtgatattgtatacttctataaaatgttatgtctgtataaatctctagaaaaaaatgaatgtacacaaaaattcaaagtagtggtcctctcttaggacctagagtttgagagttgatggtaatgttgattgagagagcctcatctagcccaagctggccttaaagtcttgatcctcctgttcccatccactgaggttttttcccaagtttttattgattctttgagtttcacatcatgtacccaagtcccactcacatcttccttccagctttgtaacctcccccccataagaaagtttttaatagcttgtcatggaagcatatagtttatctgtctgcagtgtacctctctgtccacacattttcacttgcaaatgttcagtgagtaattggtctggttctagatctctggcttctgtgacatcaatattggatcctcacccggacttcttcctgttatcctgttgttttcctgtgtcatggcgatcctgtagctttggatcagcacacctcccctttcatgagctccagcagttcacagatgatagagactttggggtgggccaactcaaaagcccttgatctgagcctgtgtggtagctgaggtagtcagcctactggctctcccacattggcaccgccaaggtgagtgcctcagctttgcctggatagcctacccattgtaggaggcaatggaaactctccgtctcccatctgcacccatgcctctagatccagctccactgtgttgcccaggtgagatgcagggccagctctcctgattactacagaggacaaggagccaggagggcatcatcacagttcccagagcccactctgcctcattcatgatcaggggcagctctaaggcaaggtgcaggccactctccaagtgcaggagctgttgagggccagagccagtgggtttttaaaagttttcttaaatttttgttaattagcttattctaatttttttttttttttttttttgagacagggtttctctctgtagccctggctgtcctggaactcactctgtagaccaggctggcctcgaactcagaaatccgcctgcctctgcctcccgagtgctgggattaaaggcatgcgccaccacgcccgcctaatttatatttttgaagataaagagcaaacatagtggctgaaattatttcacaattgttctgagtaatatagacttaaccagttggatttacttcagtattttatttttaacatcaggtttcagatgatgataaagaaaaaggggagggagctcttccaactggaaaatctaaaaagaaaaagaagaaaaagaagaagcaaggggaagataactctcacacacaggtaacgtacctgaacaatgagcattcgttaggatgcatccactgttggtggtgtggaaaggtgatatgtaggccctaagatatgtagaggtgaactaaagtgtgtgaacaacttataaaaacgtgtgtttggcctgcctgtatgtatgtgtaccatatgagtcctagtacccatcagatcttctggaactgaagttatagatggttgtgaaccaccatgtggatggtagttgaacccaattccagtacaaaagcagcaagtgatcctggccactgccctctcaagtgagttcttaaaataggaaagttggaattttgaagttttagacatgttagagatatctagatattagatacattaacatgttaatataatacattatattattataataaaagttgagtcaccctaaaaagtgtttcaatgatttatgcctttaaaactaaataaaattagacatgtactttttattatgaaatggtgagatggggaaggcagcacaaggtcacacatgacaaaacaaatcccagagctgcctttttagcttcaccagcatatcgtggaccacttccattttcctttctacctaccctctaatcctcctctccagtggtaacattccccaggagcatggtacctatttcctgcctccaaaccaggctatttttcatacagttaacaaccatgacctgccatttacttcagaagtagtcaaggataatagagctccattgttttccacaagccacttgattgtgaagtacaagtgcttcaagtgtttcctaaaccactatgatcttccaagacaatagaaaacagaagccttgggagatgaagggtagaattttggactcactggtcttgaagaaacctgatccatgtactttaatcttcatgccctgagtccttcctgtacccctaactcctccgtcgcctctgacttcctagaggaccatttcaagttcatcagaaaataggaagttgggagatggctcatttgctgaaagacctgctccacaaatacaaaaacttgagtttaaatctctagagcccacaaaaaatactggacatggtgatgtgtgcttgtaatcacagtctcagcagagatgggcagggcgagagacaggcaaatccctgaaactctgtgcagccaagttcaccaaagtggggagtgagcttcaggttcagtgagcgtcactgtctcaggaaaatttaaaggtggctgcccggatttggtagtccatacctttaatcctagttcttaggagttcaaggctatgagaccctatctagagaagggaaaataataaaaaaaacctacacactaaactttaaattcatatcagaatttcttagttgctagtcaaactcagtactgtcatgttacatttcatagactagcagtattggaaggaaacttttaatggcgtgtgtgtgtgtgtgtgtgtgtgtgtgtgtgtgtgtgtgtgtgtgtttgcatgcatgcatgtgtgcgcatgtgtgtggaggtcagaggccaattgctgagaagtcagttctcttctatgtgggtgctgggtatcagattcaagttgtgggcctggatacaagtgagtacactgcccagaaagggaagttttgcggtcattttgggcagttgttaaaatagtcactagagtatgatattcacgtgcattgacatgcagtacattctatatatgtaagcatgtaatgtgacttaggattattttattaagctttaaaaatataaacaatgaacatggaatatattaaaacttagatggacatttcctgtacaaacttttacagctaagggaataaaggaacaaagaaactgagacatttatccctgaaattacatgacttaaatatcatgactgattgaagttctctatatgccctttataatttatatatataaacacattacaccttgaagtcactgaatgaaatgctgtttttaaagtcttgtttcctcttgtaaaataaggatcacaaaggttcccattctaggatctgcgttagtatatataatttaagggggcaggatttgagacagggtttcattctgtagctcaggctggccttgaacttgtagcagtcttcctgccctgacctcctaggtactgagattatagccataggctcaccatacctggcttggacacctttttaagtgaagacactttagggtgtcttcaggacaataaacaaagtggattttaagctataaagaatgattgttatagtcatcaagaagtttaatataataaacagctttcttctgcaggacacagaagacctagaaaaggacactagagaagagcttccagtgaatacctcaaaagcccgaccaaaacaggagaaagcttgttccctgaagaccatgagcactagtgacccagctgaagtactcatcaaaaatagccaggtaacttttaaagaataataaaattttgttgccttaataattatacaataatcaatattttattaaagtactatgctaaacatataaaattaaaccacaaagaaaacctgagaggaaatgtagaacaagccaggcatggttgtgcatatctttaatctcagcactcgtgaggcagtggcaggaagatctcttaagttcaaggaaagcctggtctacaaagcaagttccaggtactacctgcagttttaagctcccactgccaattataaaacagatttccccagtgctaaaggggtttgctgtatcatgctttctcctaaagaatagaggaccaaagaaaaagtgctttcagcagccacattaacccaaagtatacaccttatgtgatcagttcagtttcccaaaatgaaacatttgtttaaatttttgataattttttaagattatgtttgttttaatttggttttcatttggttttgctttgctgttactgtttgagacaagatttcatatagctttggctgaccttaaactcactgtctagccaaagctggcataaattcctgaacctcctgtctctgcatcctaattgctgggattttaggcatgtacctttgtacctgacagtgacaaattttttaatcatatcccttctgtggaaatatgaaatattatgaaatattaatgagtcagaagagacttaatttacaaaatgaaaacatggtttctaattgggtaacctgccataggctcatagacttaaatgttttagaaggattaagaggtgtggccttgttagaggaaatgtgtcattagagatggactttgagatttcaaatgctatgctcagccaggcagtggtggcacatgcctttaatcccagcacttgggagatagaggcaggtgaatttctgtgtttgaggacagccaggactacacagagaaaccctgtctcggaaaaaaaaaaaaatcttcaaatgccatgctccccaccacaatgcctaaccctgaaactgtaagcaagcctccaattaaatgcttttttttgctaagagttgccttgatcatgatgtctctaaacaaaaataggatagttactaatacacagagctttactaaagtaagggggctaaaagttagctcagtggttgggaagaccttttgctcttgcagaccaggatttggttctcagcacccacatggtggctcacaaccacgtgtaacttcatttgggcaccaagcacatgaaacatacatatttgtaggcaaacatacataatcttaaaggtttaaataaaataacattctactgaattgcctgactcacacattcagaaattatttttgaggttcatgagccacctgctatttgaggaactagattacaacagtggacaagccattaacatctgtctgaggaaacttttaatgttagtaaactggctgctaaagaaggaatagtggcagcattgttctaaaacagtgatagtaatacttcacacgtagatttgatatatttaaatccctaaaagtattctgaggtaaaaggatataatctcagtatacataaatgtgattattattgcaaagaatagttttgacattctagttggagacatttagtgtttcaactaaattatgcttgaggtcgtcttataaaaatgcatttgagcctttctatgaattgatgtaagtaaagtgagaaatagaagggaaagacgatgagaagtagtaataaaactgaaagtatgtggtaatatacagagcagcatgaatgtagatgcagtgcctctatagaaggaaggagtgctgaactcataccacttctcttgtgtctatggagctaggaagagtaggaacaagagaaacataacctcccccttgtgttctgagtgatggtagaggtgaagctggctagtgaaaagatccactcatccctctgcctcagggtactccaaataagcattcttaatactgccctgactagtcactaccctaaacttttttattttcattattagactccatatctgaagatttagacaggtcaattcaatcagtaggagcattcccacagtctgcttgtggaatgtacacgctgctaccactgtttgcattagccctgatgcacacactgcaatatccctggttgttgaggttaggatgtatcagcaagaaggatgtcctgagttcagagccagcctagttttttaacctgctctaatagactggaagtctcaaaagagaaacaaaaagggggcggtggggggtactaaataggtaaatatgtttgtcttttaacagttttcacgaattcaaagctggtacattgatttaagcttttctgatgaatcaagaaaatgaaaacgtagaattattccctcttacttgagattcagtagctattttaactttttctttttttcaatgtgggcaacatagtaaccaaactaactggatagcccactatggagtgtgtgcctttattcattctgccaggtagcccaagttagtagagattacttttttttaaaagcttcccccttgaaattagattttcataatattaacttgtgtatgtttgttgactgtcctggcactcaatctgtagaccaggctggcctaggactcacagagatcccctacctgtgcctctggagtattggggttaaaggcatctaccaccaccaccaccaggcagtgcttatcattttatctcaagctatattcatagatgctatagatgatgttttgtttagttgtgtctctagagggcagaaataaattacactgctacatataaactaatcagaagccattttaattttgcttgctgctagtctctggatatggctttactatttcatattatatgaaatttacaaaattctgagacaattttattccaaaatagcctgtcaagactcttcctcctgctatctctgccgagccatctattaccttatcaaaaggtgactctgacaacagctcttcccaagtgccaccgatgttacaagacacagacaagcccaagtcaaatgctaagcaaaacagtgtgcctccctcacagagtaagtgctttgtttgtcttgcatctttttcttacatcctgtaagaatttagcagtctggtgcgatagtagagcagcactgctgtctaaaaatgtgtggtcccttgaaagttcacaggcttgagttgtgaggaccaggctgctaaactgatgtaagcaggggcgtgcctacttgcttggctatttgccctttaaatctgcacatgtctctgggacttctgggaccttgtgtttcgtgttactccttttccctccttcagcagctgtctatcccaaggagccagcttaagcaacataaggctgtcccctctcaaaaagaggcaggagggaagaaaagaaaaagaaaaagcagattctgtaggttgccatcagttcagtgtcagcagttacaattaataccctgggctgtaaaagaagggaggcagagaatagctaacttgaaaatatccaagactggaagacttattaaacaataaaatgttaacattagtagagttttttcatcagtgttactttttgggttttgggggcgggtgttttgttttatgtttcattttttttgttgttgttttgagacagggtctctgtttgtagccttatctgtcctggaacttggtggatggaccaagctggccttgaactaatctacctgcctcccgagtgtggggactaaaggcatgcaccaccactacctggcaccatagttgttacttttatattgttgatatatactggttatcctccttacattttttttctctcctcaccttctccttccctttttttcccatttagccaagtctgaaactaactgggaatctccaaaacaaataaaaaagaagaaaaaggccagacgggaaacgtgaatttttttttcctgaattggacatgtgtttacaaacactgtcttgaagattatgctgtttatgcaataatttgtgaacatgtacagagttttatataaatttaaaccaatttttaaaacaaaactgaacacaaccaccataaaatggaatcaaaggaaagttaatttatgaaataaagaggtcaacagaatacacagtgctggaagacacttgggagagtcttttcaattgaacgagaatgatcgtaatttaagactattatcctggttttacaacagttacctgtttacaacagactgtgccctgtctcctctgcagctgaggaataatgaatggattctgattagagagaaggctgccgtgaggccagtaggcaagtccttggatcttatgcacgaccttagaccatttgaatctgttttatgcttaaatcaaagtgctttgatcaaatgtataatctgccatatctttacatatttgttgtagcagtttgtattaaaagaatcac

SEQ ID NO: 362 - DNA, 2905 bp, Mus musculus
atgctagtccgccccgaagaaatactcggatgtgaattacacgtgctcgctgcctcagagtccaccgagctccctctggaagcatccaactggcccctgacctagggagaaaaagccggtccactgcaccaccactgcaggaaagagagcggaaagcctgctcatactccgatgggtttggccgccttgctcgtgcgcaggcctcacacctgaatccctctcagcatccagaaagcccgagcctgaaggagttccaccgtcagatttctagctcccgcttcgcaagctccgagtcgccccaagcctccaaacccacacagctcaaggagaccccactccaagactagagtccgcccggccccgcccatcgccccatgtgacgcatgccccgcccacagcctccacgtgacccgaccggcctccgcgcgcagcgtggatcgcggccggagccgccattgttccgccgggggaggacagcgggtcctggcgctggcgccccgacgccgcttagcggccgcctctggagacactctgtccccgccgccccgtgtcctcctggtggcggcggcgtgaggccggctgcggagactgggaacctttggctctccccgtggcggcggcggccctctatcccctactccggcgtgagggttggccgcgatgcgctcggcctgaggtgtcgcggccctgtcgcctcccacgactgttccagcggcggctccgctccccggcgtcatcccgcgagtctctctgacgggagggaagatggctgcacgaagctggcaggacgagctggcccagcaggccgaggagggctctgcccggctgcgggagttgctctcggtcggcctaggttttctgcgcacggagttgggcctcgacctggggctagagccgaagcggtacccgggctgggtgatcctggtgggcaccggcgctctcgggctgctcctgctcttccttctaggttacggctgggccgcggcttgcgccggcgcccgcaagaagcgaaggagcccgccccgcaaacgggaggaggcggccccgccgactccggcccccgacgacctagcccagctgaagaatctcagaagcgaggagcaaaagaagaagaaccggaagaagcttcctgaaaagcccaaaccaaatggacggactgttgaagtacccgaggatgaagttgttagaaatccccgaagtataactgcaaaacaagcaccagagacagacaagaaaaatgaaaagtcaaagaaaaataagaagaaatcaaagtcagatgctaaagcagtgcaaaacagttcacgccatgatggaaaggaagttgatgaaggagcctgggaaactaaaattagtcacagagagaaacgacaacagcgtaaacgtgataaagtgctgactgattctggttcattggattcaactatccctgggatagaaaatatcatcacagttaccaccgagcaacttacaactgcatcatttcctgttggttccaagaagaataaaggtgattctcatctaaatgttcaagttagcaactttaagtctggaaaaggagattctacactgcaggtttcttcaaggctgaatgaaaatcttactgtcaatggaggaggctggagtgaaaagtctgtaaaactctcctcacaattgagtgaggagaagtggaactctgtcccacctgcttctgcaggcaagaggaaaacagagccatcggcttggactcaagacactggtgacactaatgcaaatgggaaagactggggaaggaattggagtgatcgctcaatattttctggcattggatctactgctgagccagtttctcagtctaccacttctgattatcagtgggatgttagccgtaatcaaccttatatcgatgatgaatggtctgggttaaatggtttgtcttctgctgaccctagctcagactggaatgcaccagcagaggagtgggggaactgggtagatgaagatagagcttcacttctgaagtcccaggaaccaatttctaatgatcaaaaggacacagaagacctagaaaaggacactagagaagagcttccagtgaatacctcaaaagcccgaccaaaacaggagaaagcttgttccctgaagaccatgagcactagtgacccagctgaagtactcatcaaaaatagccagcctgtcaagactcttcctcctgctatctctgccgagccatctattaccttatcaaaaggtgactctgacaacagctcttcccaagtgccaccgatgttacaagacacagacaagcccaagtcaaatgctaagcaaaacagtgtgcctccctcacagaccaagtctgaaactaactgggaatctccaaaacaaataaaaaagaagaaaaaggccagacgggaaacgtgaatttttttttcctgaattggacatgtgtttacaaacactgtcttgaagattatgctgtttatgcaataatttgtgaacatgtacagagttttatataaatttaaaccaatttttaaaacaaaactgaacacaaccaccataaaatggaatcaaaggaaagttaatttatgaaataaagaggtcaacagaatacacagtgctggaagacacttgggagagtcttttcaattgaacgagaatgatcgtaatttaagactattatcctggttttacaacagttacctgtttacaacagactgtgccctgtctcctctgcagctgaggaataatgaatggattctgattagagagaaggctgccgtgaggccagtaggcaagtccttggatcttatgcacgaccttagaccatttgaatctgttttatgcttaaatcaaagtgctttgatcaaatgtataatctgccatatctttacatatttgttgtagcagtttgtattaaaagaatcac

SEQ ID NO: 363 - protein, 541 aa, Mus musculus
MAARSWQDELAQQAEEGSARLRELLSVGLGFLRTELGLDLGLEPKRYPGWVILVGTGALGLLLLFLLGYGWAAACAGARKKRRSPPRKREEAAPPTPAPDDLAQLKNLRSEEQKKKNRKKLPEKPKPNGRTVEVPEDEVVRNPRSITAKQAPETDKKNEKSKKNKKKSKSDAKAVQNSSRHDGKEVDEGAWETKISHREKRQQRKRDKVLTDSGSLDSTIPGIENIITVTTEQLTTASFPVGSKKNKGDSHLNVQVSNFKSGKGDSTLQVSSRLNENLTVNGGGWSEKSVKLSSQLSEEKWNSVPPASAGKRKTEPSAWTQDTGDTNANGKDWGRNWSDRSIFSGIGSTAEPVSQSTTSDYQWDVSRNQPYIDDEWSQGLSSADPSSDWNAPAEEWGNWVDEDRASLLKSQEPISNDQKDTEDLEKDTREELPVNTSKARPKQEKACSLKTMSTSDPAEVLIKNSQPVKTLPPAISAEPSITLSKGDSDNSSSQVPPMLQDTDKPKSNAKQNSVPPSQTKSETNWESPKQIKKKKKARRET

SEQ ID NO: 364 - DNA, 2079 bp, Mus musculus
cattgttccgccgggggaggacagcgggtcctggcgctggcgccccgacgccgcttagcggccgcctctggagacactctgtccccgccgccccgtgtcctcctggtggcggcggcgtgaggccggctgcggagactgggaacctttggctctccccgtggcggcggcggccctctatcccctactccggcgtgagggttggccgcgatgcgctcggcctgaggtgtcgcggccctgtcgcctcccacgactgttccagcggcggctccgctccccggcgtcatcccgcgagtctctctgacgggagggaagatggctgcacgaagctggcaggacgagctggcccagcaggccgaggagggctctgcccggctgcgggagttgctctcggtcggcctaggttttctgcgcacggagttgggcctcgacctggggctagagccgaagcggtacccgggctgggtgatcctggtgggcaccggcgctctcgggctgctcctgctcttccttctaggttacggctgggccgcggcttgcgccggcgcccgcaagaagcgaaggagcccgccccgcaaacgggaggaggcggccccgccgactccggcccccgacgacctagcccagctgaagaatctcagaagcgaggagcaaaagaagaagaaccggaagaagcttcctgaaaagcccaaaccaaatggacggactgttgaagtacccgaggatgaagttgttagaaatccccgaagtataactgcaaaacaagcaccagagacagacaagaaaaatgaaaagtcaaagaaaaataagaagaaatcaaagtcagatgctaaagcagtgcaaaacagttcacgccatgatggaaaggaagttgatgaaggtatttgagcaagggaaaggcctatagaaaatatttaagtttttaaactgaggtgtgtggtataaaagctccattgtttcacttaatcttgtatgtaacactttttaattgccataaattttatcataaagatctgtgacgttattaagaaacactttggttatctaaatcattttagcatctaatagtgcttatttattctttaaatttatgtttgctcaatattgtgagcaattgagaggccattcatcttgtctttgtttcctataaatatggtttggagtttcccatttttcttaaatataccattcctaaaaggctatgtgcaaaattcttgaataagccatttattatcacaccctaaactcatgtatcaggagcatataactctcctgtcacttctacccaacaggataaaaagataagagacaattcttttctgtcactttttcttaactgtagttgacacattttgttagaaacaaaactagaataaaaatagttttttttttccctagtataacatgagattaggataaattcttagggtaaattaatataatcagcactcttggtttttagcttagtatctaaatttattatatctgtcccaccctatttttttccctcaaactacaacttttttgtcttcccctactgaataacatcttttttctcgggctatgtcaggagcctgggaaactaaaattagtcacagagagaaacgacaacagcgtaaacgtgataaagtgctgactgattctggttcattggattcaactatccctgggatagaaaatatcatcacagttaccaccgagcaacttacaactgcatcatttcctgttggttccaagaagaataaaggtatattagtggaacataagagtggtacatcaaatcaaactcctttaagccagatgtacaaaatatgtcacaatctttttgaactgctaactttgtgctgatatacccttcttcatgagagttttgtgaaccacatcctggtttaccatgtaacagcagtgttgttaatattgcctaatgaatggcttattaaattaaaatttgcctttctgccttgagtcacattagagaatgttgttgctgcttttccttgtgtgtgttgctttgccccaatcctcttacatctccatttcttacagtggataaaacattgattaaatggaatatttatcacc

SEQ ID NO: 365 - protein, 190 aa, Mus musculus
MAARSWQDELAQQAEEGSARLRELLSVGLGFLRTELGLDLGLEPKRYPGWVILVGTGALGLLLLFLLGYGWAAACAGARKKRRSPPRKREEAAPPTPAPDDLAQLKNLRSEEQKKKNRKKLPEKPKPNGRTVEVPEDEVVRNPRSITAKQAPETDKKNEKSKKNKKKSKSDAKAVQNSSRHDGKEVDEGI

SEQ ID NO: 366 - DNA, 85665 bp, Homo sapiens
cgtgacccacggtcgtccccgcgcgcggcgtggatcgcggcccaagccgccattgttccgccgagggaggacagcggggcctggcgctggcgccgagacgccgcttagcggccgccactggagacactccctcccgcctcccgggtctcctggcggcggcggagtgaggctgacagcggggaacctgggagacccctccgccctccccgcggtggcagcggccgatccccggctccggcgcgagggacggccgcgatgcgctcggcctgaggttacccggcccggcccttcctcgcttccctcgactattccactgcgtctccgcgccccggcgtcatcctgcgagtccctctgacgggagggaagatggctgcacggagctggcaggacgagctggcccagcaggccgaggagggctcggcccggctgcgggaaatgctctcggtcggcctaggctttctgcgcaccgagctgggcctcgacctggggctggagccgaaacggtaccccggctgggtgatcctggtgggcactggcgcgctcgggctgctgctgctgtttctgctgggctacggctgggccgcggcttgcgccggcgcccgcaaaaagcggaggagcccgccccgcaagcgggaggaggcggcggccgtgccggccgcggcccccgacgacctggccttgctgaagaatctccggagcgaggaacagaagaagaagaaccggaagaaactgtccgagaagcccaaagtgagtatgggatgagcggcagtagagaacgggcgaagggcgggcgtggagaccctcgagcttgggggaggccgcgccccagccgggaaggaaaagagtgcttagtcgaaagccgagaggcagcactcccaagtggaggaggaggtgataggtggtcatgttatttggggaatggggggaactcaggaagtataggacgagtggggaagcccagtttcgaggaaggaagttaggaggtctgggggtccgttcagataggcgcccagaggtcaagccatctttgggaaccgtcaccgctagaataagcacagcatccttccttgaggcctgcagagtaggctgcatgtggagcgtaatgggaccttaaggtggtgttaggaagttgtataaagactgcgctcggaagacagatgtctatctcaagtcacattgagacagtaggcagtggaagaagtgcggtgacctagaaattctggggcttacacaggattaaaggtgtccaggtctagacgcgcttccattttagttgggactgttaaagggaaatggttgcccattcttgttctggcaaatgtggccaacagaggccggaacgggagcaaggcaagagggggtcggttacctaatacgctttgaggtgtatggtcctgtgagaaagagctaaggcgagttcaacgaacgagtctgttgcacactctgtggcgtggtagatttgtgaaatagagtaaagggagatgacagggcagaatggtgaaagccgagagaggaattcaggcaccgatttactgggccacgtgtggaagttgcagagggcatcacgtctgtcttaggccttcatgttttacgtttacattctttattgccattcccatggttctcccattatatctttcatagttttatgtatttttaaaaatattttacatttgagcaaattgagactatggagggtatgcagagttagaaacagcacctaacctatttttatatccagcgaattaagatcttcaccttttcagtacaattcagtaagccagtacgaaggccctaccatgtgaaatttgcactctggtgtttggagggcagtgcaaggtatacacgtagagtcagtgttggagagtagtggagacagattcataaataattagaattttgcatagactgataggtgttaaagaggttttaactgagtgttaatgaggtttggagggtaggagacatttcactggagggctttaggaaagttgttggaggaaatggggtttgagttccaactaacaagagttttgttggtaacaaactctaatctctagattagagatgtgacaggtcacagttagtgcattatgaggcctggataggccttcacgttttgcctgctgattaagagatgcaagatacatatgaaacctggaaaaggcacaactttgtcaatgtgaatactaccataagttaggagaggagaaaatagaactgatttggaacataaataatttaaaaatttgtggagactatcaagaattaccaattatcaaagtaatgttatggtgaaaatagagaaccttgctccaaggtaaggaaagaaggtgatcttgaaagaaacacattcagcacaaacccatgtggatgaagcacattgtgaaaatttcaaagccctatttgggacatctagaaatttcagataaacttgagttgagagagacaggttctccaagaacccatccgacatgcgttataacactcaaatgactcatctgaaagaatacagattccggcgaatgcttatacattactgtgaaaaatgctcagtagacttaaaagacttaccccctcattttcattcgagttaaggaagtggggagtaaataagtaaacctagcgttagctttgaggagtggagaatgggaagactgtatggctgaatgttaattgggtgaggaagtatccttatctaccaaatattgaagatgtattcgagaagtttaaccaacatttacaaaattgtgactttcaagcttttctgactgcaacccacaataagaaatacattttacattacattacacacataaaactgttctgtttttctttaatgttcatgacccactaaattcatttcacatttgactgtgaggcatgacccacagttatggggtagctttacagggcaaagaagtacaagctgccgtttggtactcattagatacctttaactgtgctaagtattgaagaaaagcaagatactgcttacaaattgaaggcggtgaaaaggcatacaatatgggcatatctctctgtgacagggatacaaaggttaaagctcagtttctccccagggagctttttgtttcagtcgtggaaaaagatatacttaagaaattaatgatacaactggatgtggacccaggtgggcgtgaaaggccttgtcacagaagctgactttgaaagtgggtaggagtcccccaggaattcaagaacgacctgggcaatatagtgagacctcatctctacaaaaaatttaaaaaattagcccagtgtggtggtgtgcacctgtagtcccagctattctggaggctgaggttggaggattgcttgagccaggaggtggaggctgcagtgagccaattcgaggccctgtctaaaaaaaggggggaagggagggcagtaagagcaagataatgtgagaggcctgagaaacaacaaaggcccaggattgaaagaagacaactctgtcagcctggcaggaatgggaaactctaaacttgagtaaggcatttcaccttgctctgttcagtgtatcttgtttacaaattggaaatcttagttgagttaaaacactgcagtattcttcaaagtgttatccctggctacttgcaatgagtcactttgaatgcttgtggaaatgcttgggccaggcacagtggcttatgcctgtaatcccagcactttgggaggcactgttgggaggatcacttgagcctaggagtttgacgctgtgatgagctatgatcaggtgactgcactccagcctgggcaacacagcaagactctgtctcctaaaagaaaaaaaaaaaaaaagcttgtagattcctgatctctgatcttttcgttccattatttttagctttctcttaaatcactccaaattttgcgactcctgttttcaaatttttcatttgtagagtaaatagtggcgaaatctgtatttacctcaacctgtttataagcaatttctgaaattattttatcaatttgttttttatcccctaataaaaccatgccatagatcttttagggtatgaattacagtttgttccctaattaaaagtgaggggggccactttttactgggctcagttcttggcattttttcttttcccccccacccctgttcctggcatttttggaaattattatcttgtatgtatttttcatgacatctacctcaaagtctgtattaaatgggcactcaagtattttttcacttgatttttaatctgagtaatgacttagattgaagtgaagtctgcgaaaactggtctgtaacaattggctttgaatttcaactggaagcacataatcaggattaatatcaaagaaaattgtcttttttttttttttgaaacagtcttgctctattgcccatgctggagtgcagtggcggttatagctcatagctcactgcatcctcaaactcctggcctcaagccatcctcccactttggcctcccaaaatgttgggattacaggcatgagcaacctcacccagctcaaaaatttattttagtggacaagttatttgcatattagtgtaggaatgtttataaagatttgctatagtgtaattgccatatctctaagctcaatgaataaaataatagtgtttccttttgtttgctaccagatagccttgcacagtgcttggtactcaaaaataattattgaatgcataatatagtaagatgtccaacaaaagtatttatacagcttactcctattattcatgcttggtaaatacctatgtgagccccctttttctctttaagtggaaagtggctgtttgcctcatctggctgtaattttgtgaggtgaagcactgcctatataatgaccccataagattatgatattgtatttttactataccttttctatgtttagatacacaaacacttaccattgtgttacagttgccacagtattcagtacagcaacatgctgtacaggtttgtagcctaggtttgtgtcagtatactatgtgatgtttgcacaaagatgcatttctcagaatgtattctcattaagcagtgtatgactgtattctaatagtatgcagtgtcttttgtagtcattacttctgttccagtttcactgccactgccctactttaggactttattaccttttgtttagactgttctaacatcatcctaactagttttcctgcttccagtttcttttttgccaatcttttctacccactcgtgtgagtagagtcttttgaagcccaaccctgatcatgtgactttgatgttcacatcctttcagtagtttccccatcacctgttgaataaaatgcaaaattcatgacatggcactcgagtctcttcatgatctaaccctaccttaggcttgtctctcaccattactcctaagacaagaaataattctgcttagctagatttctgtgtctctttatttatgattattttcatttttgttgttgttgtttttggagaccagagtctcactttgtcccaggctggagtgcagtggtgtgaacacagctcactgcagcttccacttcccagactcaagcattcctcccacctcagcccctcgagtggctgggattacaggtgcacgataccacacctggttatttttgtactttttgtagagatggagtttcaccatgttgcccacgcatggactcaaactcctgagctcaggcagtccacctgcctcagcctcccaaagtgctgggattacaggcatgagccactgcccccggccattatttttatctattaaaagacccttctttctatctctctaccaatttcttttcttttcttttctttttgaaacggagtgtcactctgtcgcccaggctggagtgcagtggtgcgatctcagctcactgcaaactccacctcccgggttcacgcacgttctcctgcctcagcctcctgagtagctgggactacaggcgcccaccaccatgcccagctaattttttgtatttttagtggagatggggtttcaccgtgttagccaggatggtctcgatttcctgacctcgtgatccgcctgcctcagcctcccaaagtgctgggattacaggcatgagccaccaggcccggccagtttcttttcttatttttatttttaaatttcttttcgaaacagggtctggctgtgtcaaccaggctggagtgcagtggcgtaatcttggctcactgcaacctcaacctcccaggctcaagcgactctcccacctcagcctcctgagtagctgggactacagacgcacaccaccatgcccagctaatttttgaattttttgtagagatggcgttttgctatgttgcctagactggtcttgaactgctaagctcaagtactccacctgcctaggcctcccaaagtgctggaattacaagcgttagtcactgtgcccagcctctctctaccaatttccacctgtccttcaaggcccagctgcagtgctgcttcaactgtaaagccttccctagctcctcagctagagttatatattgtaacacctagcataatgtttcgtgtttagtggaaactatggaattgccttttaaaaatttatttatttatttattttttgagctggggtctcactgtcacccacgctggagtgcagtggtgtgatcttggctctctgcaacctccgcctctcaggctcaagcgatcctcccacctcagcctcccgactacctgggaccacaggcacacaccaccacacctggctatgccatattgtttagattagaatggtctaatatcaccatttcatttggttctaatagtcattcagcaagtatctgagtgtctgcccattatccatattaggagcacaaaacgcattactagtggtcacacacataaaaggtatgttataaatagtactggaacagatcagcatagttgattttctttatctgcagaagttctataaagttcccactgaattagcaagtactaaactagtgctcctagggaaagtgcaaaattaggtccaagcctctggtcacaatattttcaccaataccatatacaatacatggtcttgttttatgagtgtttctgtttaaagacatttaatttaattgattcatatcattgaactcacggccaatagcactagaactcatgcctgaacaaagcttatctaatgcattattttctttgtaaggtatatcacagccttcttatgcttaggaatgctcagcagcacttcagcactacagttggggaccattataaacagcaaaatcactaacaaaaagcacccaaaaaatgcaaaatatgtgacactaaatagtcctcagaaaggatacttatttacagtgatgagagctgaaataagaaggtggaggcttgacctcagctgggaatgtgcctgcagagtgactttgcagctctgtgcatgtgcgtgtccagaaatgaccgtgaaagtacctcaagtattgattttggagtaacaaataaattttagtgaaaagataaattcaccaatacagaatccattaataatggggaacaactgtatattagtccctatctgtatctagactgttctgtcatctccagaacctcatgtctacatgtatgcttgatttctctgattgggagtctgatacgtatctcaaactttttaaaaattatctcaaacttttaacatctccaaaacagaacctattatttcttgccttctcccagtcttccctatttctgtaagtggtaaattactctaccatccattcagttattcaagccaaaaatagaagaatcatccttgattctaatctttttctcacctcttcatatcttcctcaccttatatctaacccatcagcaaagtaccatcaattttatctccaaaatatatattcaatctgactactttttctagtgtcaccttagctcccctaacctgcagcagtagccttccttttactgcatccagtcctttctcaacgcactagtaatgagttttttcaaagcaaatcactatgctgcctaaaaccaacacttagtagcttttgcatttaaaatctaaatctctttccatggcccgtatggcccagcacctgcttttcattctaagctgaatttgtgtgagtttcctgtcatttgctgttcagttcttgaaactctttcacaacccagcgcctttacatgagctattattaacacttttggaacaatctttcccccactattctcctcagcctttagttttcaccttaaaagtcaccttccccgaaaatcctttcctgatcaccctatgtgaaatagacatccctttctattttctgtctcaaccccttagatgtttccttcatagtggttattacagtttgtacattatttgtttacttacccatttacttttttgggttctctccctccccagattgtaaaccggtggcaaactgcctggcgtataagtgcctttggtaattatttgttgaactaaaagctgaacaaagtgactaaaataacatctcacagttaattggataatctgttattgagttaaataaatttatctcttaatatattcccagtagaattgtgtttttttattcttaggtaatagttttgctggtaatattaaaaaagttatatcacttgccacctatagagttttctttttacctttaagtcactctttgtcagttttaattcttaagagaataatcagccaggtgcggtggttcacacctgtaatcccagtacttcgggcggaccaccaggtcaggagattgagaccatcctggccaacatggtgaaaccccatctctactaaaactacaaaaatcagccaggcatggtggcgtgcacctatagtcccagctactcaggaggctgagacaggggaatcgcttgaacccgggaggcggaggttgcagtgagccgagatcgcaccactgtactctagcctggcgacagagcgagactctgtctcaaaaaaagaaaaaaaaaaaaagaataatcatttgctcaaaaaaatccaaattataagtaaaacaaatattcatgattttacagaagagaaatcttgagattcagaaaaattaactgacttattcaaggtcataggacaaaggagtttaaaaggcaaaacaatatcctaatttctagtctaagaactttgttatttccactctacctctctggtttcgatggcatgttccaggatattaaattgcattcagagaacaaatagagttttcccagtgagttatggctttattgcttttaaaatttcgagtcagaagtttctgctgaaaattataatgaccttacaaaagctccagaattttggctccatttgtttggttatgtgacaggattttttcatcttttcttttcattctgccagaggcctaacgtaaaagacctttaacagttctgacagaaaagacctttagtagttgtgcccatcttagataccaagaacaacaataaaccctatgaacattcatttttgttgtgctttggcattactggttagtgtactatttctcaaggctgtaaaagccttgagagtatttttaaattattattcaagcaaaattcagagatataagtgaggaattggtgttatttgatcagttttaaaatgcacttgtttttctctccagctatgctagtagttttcaaactgctccatggaatgccaggcttcccagaaggcatccgtcagaatgtcttagacatttttcttctaagaaagaattatacagatgtgtatttgctgtatcatttgtagtccttatcatacccatcagatgtaaaatattgaaaaccaatgcttgtatttagtttttcagaaatcatctttggcatatcttggccatgtgacagttattaccatctccccatctcataaaggtaaccctgagcatccctgctgtagtcaacaaggagacagtttggaatcctgagttgaatttttggctgtttagaaagcacagggatctttaccactaaaggaaatatctcagtatatagtgagattttgcaaatttgaaccataggttatatttgtaagattgttctctcagttattaagagtttgaaattggggttgaactgtgtctaaagctatggtttatgtgtatgtttagtttatgtagttgctgtgtgcataacatttggcaggggaaaatgtttttactttcaaacaaactgacaagaaattgttccatcttgaatttgtgtaagaacgtttcagaactaaaacaaacttaccaaaactaggtcttgtccattaaatgagataatgcgtgtaatgtgtctagcaagtacttggaaattattattgttaagactgtcttatagtctaacttatcaactacaatgatgcctcttctgaatttcctaatttcttgcctttatctttttttttttttaattatactttaagttctgggatacatgtgcggaatgtgcaggtttgttacataggtatacatgtgccatggtgatttgctgcacccatcaacctgtcatctaggttttaagccccacatgcattaggtatttgtcttaatgctctcttgccttttatcttttttatgatgaggattatatatatacacacacacacacaatgcctcctgtatgctcagtatcacttttagccaataaaattgagattctggccaggcacagttgctcacacctgtaatctcagcattttaggaggccaaggcaggtggattgcttgagctcaggagtttgacactagcctgggcaacatggcaaaaccctgtctctacaaaaaattaactaggcatggtggtgtgtgcctgtagtcccagctacttgggaggctgaggtgggaagatggcttgagcctgggaggcggaggttgcagtgagtcgagccgagatcacacaccactgcactccagcctgggcaacagagccagaccctgtctcaaaagaaaaaaataaaaatgaaattccagtgtttgtccagggtgaaacacatttgggatctcaatcctggtctcccagcctgctttcaaaacctgtactcttgagagtgtgagggagagtataccttttgttttgtactttactatatgttattgtatacctgtcttcctttactaggttctaagcttcttgagtgcaggcattgagccttatctttgtttcaaggtgttaagagttctgcatagcactctactgagtgaatattatgtaattttcttggaaaacagcagttttttaaaaagaaagataacattacaatgctgcctctagagcaagcctggactattttaagcctctgagaggatatatttgcttattatttttaatccattaacttcccaaaagaatttgcatctggagcattggacctgatggatgcctgtccaggcccttttgaccaccaggacttaacattcatctgagcttgttaatataaaaaaatggcccaaatgcttgaacgtgggaataaagggcataggccatcatagctttggagagaaaagggtagacgggccaggtgcagtggcttatacctgtaatcctagcactttgggaggccaaagagggaggatcacttgagcccaggagttcaagaccagcctgggcaacatagcaagacctcatctctaccaaaaatttaagaaaaattttaaaaagaagggaaaaactgtttctggagcaggtatgctttcacatgctctgtcacttggtgtaattcaaatgtaaatgtgtaagacaaagtatatatttttctcatatttacaaatgatgaaatcaagggttaagtcaaggaaaatggttaaaatcacagtgattaaatatggaagttaagccttaatcccaggtttgtcaaactccaaagcccatagtcttctcatattccattttttgggggaagttggtagactgcccttctagtttctaaacctaagaagtttctaggtcatttgaatcatgatctttacatgttgtggctagaaatacagtttacgtaactaagtgaaagtagggttctatgtgatttcattttagaagtcagtgttaaaccttatatatgcttacctcagatacaggttcttttgcaagttggaatcagttttaacaagttaagagtgctcaaatgacatctgttattaagcatacttttttttttttttttttttgagacagagactcgctctgtccccaggctggagtgcagtggcgcgatctcagctcactgcaacctccgcatcccaggttcaagtgcttctcctgcctcagcctcccgagtctgggactacaggtgcttgccagcacacccagctaatttttgtatttttagtagagacggggtttcaccatgttggccaggatggtctcgatctcttgacctcatgatctgcctgcctcagcctcccaaagtgctgggattacaggcgtgagccaccgtgcccggcctattaagcatacttcttattctgaactttaaaactccttgaggcagaaactccattcatatgtccttgttcctacagtccttagcctgatgcctggtacttgagtaccaggaattgaggccaggtgcggtggctcacacccataatcccagcactttgggaggctgaggcaggcgggtcacttgaggccaggagttctagaacagcctgggcagcatagcggaacccgctctctactaaaaatacaaaaattagccaggcatgatgacatgtgtctaatgctgagacacaggaatcacttgaacctgggaggtggaggctgcagtgagccaaggtcatgccactacactccagcctgggcgacagagcaagactgtgtctcaaaaaaaaaaaaaagttatggaattgtatgaaattaataaattgaagattgactagtctgctatgtggccccctcttccattccattttcccctgatatatagatatcctcattctggtttactaccacccctgccagcacatacatacaaagtgttcctttgtgcatgcattttaaaaaaagaaagatccaggtgtgggggtcgaagaaaattataacaagaaggtaaacatggtgatgtctacaaggagtttatccatcaaaataaaatgattctatcatttttctgttactggttgattttcaacaaatttgaaagatatctttggtctaacttaaaacatagattgtaagctatatatgaaataactttgattggccctggtggggaagaccttaaagttcttgagagaattttaaactggggtacaatgagaggcccatgtaattgctaatctgtagaaagccaccatatagattaaagttccatgatcagagaaaactactttttttttcttttgtatttttttttcttttcttgagacagggtctcacttttttgcccaggctagagtacagtggtgcagtcacagctcactgcagccttgacctcccaggctgaagtgatcctcccatttcagtccctcgagtagctgggactacaggggcatgccaccacacccggctatttttttaaattattttttgtagagacagggtctgtctatgttacttgggctggtctcgaacttctgagctcttgctgatcctcttgccttggcctcccaaagtgctggaattacagccgtgagccactgcacctgaccaacaacactttcatgtaaaacccatattgacaatcacaagggtagacacattggatttgaagttttggtttgtaattagttactattcatgtaagtagatctatataatatgctcccatttagggatttgctaatttaagtatgattagtgattttccagggcaaggccttctcgaccagctgttggcaaaatgaaaggacacattggctctgctgtatgaaggagaatcacctcagtgtattcttttttccagcaacccaagaattatattgactttacttttgggataggaggcttattgtttcatggcatcaggcatgtgtgggaagttgctgatgacttctggaatcccagtaatgatgaaagctatataaattctaagagtttagtggaaaattgggagatctacacaggtcagagagaacagctgcgattagagctattatgtagattgatgttgcaaagaaggaactaaaattggcacagataggagcgtatgagcacctttggcttgctgatcatttcagagcctatggaaatgggaactgaatgttcctgaatctgtgggaatgcagttggtcactttcagactttgtgttgtttgaaagaaaagaatgtttcatatttcatttgggaggctacatcaatattgtttgcagttgttctcacataaatggcattgaacttgttggtgagtttttaagacagtttttgaccgaataatttctaatcttcctagtatttagtaaataaatcccaatgactcagtgtcatgtaaatgagtaaaatgaaggtggtatatggcagtatataagtgattatgatggagagtttcctgaagggattaattaaatgaagtttagcagatataagttttgtgagttgccagttgaagagataggagactatagaactgaagctgcaagattgttcagttggtataagtcttacatggaaaagtgtggccacaagaaaatcagaaaaggcaagtttggccagagaagatagcatgaactaaaagtagcatataagaataagatgatgatattagaggccgggtgtggtggctcacacctgtaatcccagcactttgggaggctgaggcgggcggatcacgaggtcaggagatcaagaccatcctggctgacacagtgaaaccccgtctctactaaaaatacaaaaaattagctgggcgtggtggcaggcatctgtagtcccagctacttgggaagctgaggcaggagaatcgcttgaatccaggaggcagagcttgcagtgagctgagattgcgccactgcactccagcctgggcaacagagcgagactgcgtctcaaaaaaaaaaaaaatgatgatattagaaagtaaaattaaacaaagttttgtattcctgatgtagatacggccctaagtccacattccattttgaggtttcttacctttacccacgtactacctccctcttccttccttcccccatatgcataaataacagaagagggattagaagaggcaacattagaagtggcaagacagcatagaagaaagaaaaccaaatcaagagtaagaaaacctggttttagcattagctgtctgactttaacaagttgcttcagacccagcagattatatttgggttaattaggaatttaaccagctaaaagacagcttttgttttgattttctgccacagatctttgtaaagcctacaaattgaatttgagaatataaatggtctccttttccaactttgtatccctgatcattgttaacaaatgcatgttaagtcatattatagaaacttggaacactttgtattgttttcttgagtatagctctgctgtaatgactaggtagctgataaaagtgtgttctgtaagaactgaaaataaagccattgaaactagtatattgacttactaacatgttgaatttgaggggaatgcataagtgaaaagatgttgtaggatccagaaagacggttagagtacagatacctaggccccattctccaaacttctcagtctggtgatggggctcagaaattattatttaaaaagtaaaaaagaggctgggcacggtggctcacgcctgtaatcccagcactttgggaggccaagatgggtggatcacctgaggtcaggagttcaagaccagccagaccaacatggtgaaaccctgtctctactaaaaatacaaaaattagccgggcgtggtggcatgcacctgtaatctcagctactcaggaggctgaggcaggagaatcacttgaacctgggaggcagaggttgcagtgagccgagatcacaccttggcagtccagcctgggcaacaagagcgaaactccgtctcaaaaaaaaggtaaaaaaagaatgattctggttaaaagccagatttgggaatcacacacttgagtctactcatgagcatctctaagtgctatccatcattttattttaggaatgttaggaaagcttttgtagccttttgtaggctgtggcaatgggtcggaaagcttcttactcccagaacagtagagccatgaaattacagaattagaggttccattagagattgcctaacattcatttgtttatgtatcatctatggctgcttttatgctacaatggaggaattatgtagttgcaacaaagacatatgggccaaaaaataaaaataaagaacaaagatatatggcccataaaacctaaaatagtttctgttttgttttgtttttgctgaggactgttgatggcaatcaataaaatatttttttctgaattttattttgccatacaccctgaatatgtttataaataaaatattttctatctggctgtttacagaaaaagtttgctgacttttgagtagatcatacctgtcactttatagatgtagaaataaggctcggagacaatgagtgaaatattctgagattacacagttaattggtggtcaaattgcaaacacagttttgttctccttttaactgcttccattccattatttttgttagagggactgataccttggtgagataagaaaatctgtggtacagaattttgcttatgaattttatatatatatatatataaacactagggataatctatcaactcttagataacattggtgtacaaaaactttttaaatttaggtacagaggtaggatttgattgtagtatatatggtttcctgcgtataaatctttgcactgatctgctaagcagtttgataatatgatactttttgttgcctgtgcagccaaatgggcggactgttgaagtggctgagggtgaagctgttcgaacacctcaaagtgtaacagcaaagcagccaccagagattgacaagaaaaatgaaaaggtaagtttgggagcatatgaaattgtatgcaagactcttaatagaatgacatataaggataatgcttttctgtttcataagattgtatgtatacctctcatttaaacaaaactcagaaaatctgaattaaccatagtggatgggtggtaaaagtttaactgagttgtttttgtttttttaaaggaaagttgcatcaccaaatattttaaacattgctgtggcaatactaaatattcattataccaaaaacaattcattcacaacttgaacatcttgtgtaagttttcagatatataacatatataccttttattcaaaaacagaactgtggaattgtgttacctttgttagtaagacacatctagcatgaaaaccttagcaaaatcgttcagtgatgtttagtgttgaaatagatttctgttgtgttggaaacataattgtctatttactagacatagattaacttcatttaacaaaagaaaatgtgggccaggtgctatggctcatgcctgtaatcctagcactttggtaggccgaagtgggtagattgcttgagcccaggagtttgagatcagcctgggcaacatggcgaaattttgtcattacaaaaaataccaaaattagccaggtgtggtggtacgcacctgtagtcctagctactcagcaggctgaggtgggaggattggtttcagtgagccaagattgtgctaattcactccagcctgggcacccgagaccctgtctcaaaaaaaaaaaaaaaagaaaaaagatatagatgtgcactttgatttggatgtgagattttccaagtaagacaatctatcataccacataaatggtacattcctgagattttattaattttccagttgcttggcattagaaccgactcatttttacttgacttaatctagcttggaagtaggcaaaatgaataagaaattcttaacagtggttccttctactgtgagaaaaagacttttcattcagttcccttttgtgcatcgaattaccctccctttccttttttttttttaatatagagacaggggtctcactatgttgcccacacaacatagtcttgaacttctaatctcaaatgatcctcctgcctcggcctcccaaagtgctgggattacaggcgtgaggtaccacatccagagcccctccccctttttaaaaaaaaatcctgtctatgcatagccccttttcaggaaaaaaaaaacaaacaaaaacaaaacaagacagtcactgatcggtaagtggtttctgggaaccacagtgcagcagctctagcttcttggaatagtggtatgaaatggttgctgctggctgggtgtggtggctcacgcctgtaatcccagcactttgggagcccaaggcaggtggatcgcctgaggtcaggaattcgagaccagcctggccaacatgatgaaacactgtctctactaaaaatacaaaaattagccggatatggtggcacatgcctgtaatcccagctactcgggaggctgaggtaggagaatcacttgaacccaagagacagaggttgcagtaagcagggattgcgccactgcactctagccagggcgaaagagcgagactctgtcaaaaaaaaaaagaaagaaagaaagaaagaaatggttgctacagtttcttaatgcttccaatttcaaaatgtctttgaagaagtggctaagtcacttcttcaaagacattttgaaattggaagaaccaagacagctgcaggtagaatagcttaaaatgaaggatagttttgggaaataattaaatttatgtctgactttgtctttggcagaaaagtaatgacttgtgttaacaagtaagcatgtaacataaggagtgtgagtttatagagtgactagttgatatgcccaatatagatttacacatctctgacctagtgttttcttttttctgggctttctctctattagtgagtaatgtatacttactcctgcttctactccctgaattgccctgaaaaatttgtagttgcagtaattgaggaactaccattaacctcttagtgattaatttatataaattgaatgtgacagggtataaaatcacagtttaaagtttatcatcattactttgaaatgtcttgtggtgggaaataattataatagttgacatttacttacttaagtataatatggcaggcaccatgcaaggtgaggtatgtttgtatgtgtaaatatacttacatatctagtagggacagcttattgagtacttactagatatacttttaagactttatggttgttgctgggcgcggtggctcacgcctgtaatcccagcactttgggaggccgaggcgggcagatcacgaggtcaggagatcgagaccatcctggataacatggtgaaaccccgtctctactaaaaatataaaaaaattagccaggcgtggtagcgggcgcctgtagtcccagctactagggaggctgaggcaggagaatggcgtgaatccaggaagtgcagcttgcagtaagtggagatcgcgccactgcactccagcctgggcgacagagcaagactctgtctcaaaaaaaaaaaaaaaaaaaagactttatggttgtttaaaaaaataatttatagatattatttccttattttcacaagggctttgaggtggtagtattatatccatcttacaaatgagaaatttgaggcttatgttacctgagctattgaaagtatagtcagttctaacccaaatctatctgacttcaaagtctttactttttactgccttgtattatttctaatcctctcagaaactctgccaggcagatagttatagccccattttacagataagggctccagtgcctagaaaaattttgtgatttaattaatttgatacagttggccgggcacaatggctcaagcctgtaatcccagcactttgggaggctgaggcaggcagatcacctgagatcgggagtttgagatcagcctggtcaacatggtgaaaccctgtctctactaaaaatacaaaaattagctgggcatggtggcgtgtgcctgtagtcccagctactcgggagactgaggcaggagaatcacttgaacacaggaggtggaggttgtagggagctgagatcgtaccattgcactccagcctgggtgacagaataagattccatctcaaaaaaaaaaaaatggatgcagtttctggactaggatgtgaacgcagcttattctgattcgaaaaagttctttttatcatttaacagtgccacctttcagttgctgttgctttttcagtacaaagtttctacctttggtttcttgcctattctatttgacttttcaaataataatacatgctacaactcatggctggtgttctgtttttgccatcccgttttgcattttgaatttatgctttttaatgtggtcaggtctaggtgactcagttaattttttgtggtattgcactatgtgtgtattgcgctttgtgttttaaatagttggtgttttttagacttattttctttctttctttcttttctttcccttctttcttcttttccttccttccttctttcctttcttttttttctttcctttctttgttctttcactcttgttgcccgggctggagtgcaatggcacgatctcagctcactgcaacctccgcctcccagctcaaacaattctcctgcctcagcctcctgaaccactgggattataggcacgcaccaccacgcccagctattttttgtatttttagtagagacggggtttcaccacattgaccaaggctggtcgcgaactcctgacctcaggtgatctgcctgcctcggcctcctaaagtgctgggattacaggcgtgagccagtacacccggcctgcctttccttataaagaaatacatctttgatcttatgcacctttatatatattatcatatttttgtttttgctctcggagccatatcttgggcactttgagaagtacaatttttgtctgtagagtaattgtactcctaagctgtgatattgattaccttgccatatcacttgagtaagccttgtagataaaagtttgcctagaaactgtatatgacaagatcttaggtctataaagcaggttaaactgctatagttttctaggtccttatttgggtttgaaagtcagtgtttcattagtactagtctctagtagactacacataggacgattagccagactgaatgcattgtgctaatagatgctaaaggtaataaaaatgtaagatgtacttaccctcagattacaggctagttaaggaaaggcaagcaaagagaagatatctagtaatacaaggcattaagtgctggatattcagaggagaaaggttatcctacttgggtagccataaaaagattgacttaattagtctcttaagtataggaatggtattttcagtaagtaggcatatggagacaagttttagaagggaagagaaacaaatgaacacaacctgacattatttagattaaacaaatggacatattcagacataaggggaagccttagacaagtttgactggtcaagatagggtagggatgtgataaaaacttagatattttcaactggcagcaacattgatgattaatgaatcagttttgcatctctgattgtaaagatctggccgggcgcggtggctcacgcctgtaatcccagcactttgagaggcagaggcgggcggattacgagaggtcaggagatcgaggccatcctggctaacacagtgaaaccccgtctctactaaaaatacaaaaaattagccgggcatggtggcaggcgcctgtagtcccagatactcaggaggctgaggcaggagaatggcctgaacccaggaggcggagcttgcagtgagccacgattgtgccactgcaccccagcatgggcgacagagcgagactccgtctcaaaaaaaaaaaaaaaaaaagatctgaattaatgtagaaatgtaaagattgctagtgagagaaacaacggaaacaaaatgtgtaaacttttgtcaccaccaagttgttaggatgaagtcagcgatatccactaaaccctgatatcatttattacaagtattaataaggtcttaaatttttatgatgctacacaatatacaaaatatttgtacaaaacattttcatatctcttaatcctgatgaacaactctgaggacattatcatttcttttacatagctcaataaagagttttgtgaattgtccaggaacacatagctgataaggaatgctccttcagtttctctaaggcagcagtttttgaagcatggtcagtgaacccctaggaagggaccctagtgaccctttcattaggtccctgaaggcaaaactattttcataataattaagacattattttcctttttaactatgttgatgcttgcactgatggtgcaaaagcgataataggtaaaactgctggctccttatcatgaaccaaggcagtggaaccaaacttccactcattatattcttgttttgttttgtttttgagacagtctcactctgtcgcccagggtggagtgcagtggcacgatctcactcactgcagcctccacctcccaggttcaagcaattctcatgcctcagtctcctgagtagctggaattacaggtacctgccactacccccggctgatttttgtatttttagtagagacggggtttcactgtgttggccaggctggtcttgaacccctgacctcaggtgatccacctgcctccgcctcccaaagtgctgggattataggtgagatccaccgtaccctgccattttgttttgtttgaagagactctcactctgttacccagcctggagcgcagtggcacagtcatgctcactgcagcctcgacctcccaggctcaagcaatccttctacctcagcctcccaagtagctgggactgcagatgcacactaccatgtgcccagctaattttttgtagagacgctgtcttaccatgttgcccaggctgttcttgaactcctcagctcaaagcagtccacctgccttggcctcccagagtgctgggatcacaggcatctcattgtattttttactgccatctactcacagttaaaaaaaaaatgctagtttcacttgagtgtccttaatgaagcagcaaaaattattattagctttattaaatctttattaaatctcagttcttaaacacatgctttttaatctgtgtgatgaaatggaatatatgcataaagtttgctgcaaaatgaagactgatgattgtcttgaggaaaaacacttatgcaatggcttgtgtgccaaattagccacttattcatattactctttttttgcttgaaagaatgactgatagacaagccgtgattattcagatttgcatatttgcagaccttttctcaaaaatgaacaaggctatcttgtcgcttaaaggaagctggtagtatttgttgcaaatgataacatgacttgttggcaagtgaaaattagaaatttggaaaatttgctggtgcagtagctcacacctgtaatcccatcactttgggaggccaaggcaggaggattgcttgagcccatgagttcaagactagcctgggcaacatagcgagaccctgtctctatattaaaaaaaaaaaaaaaaaaaggaagaaatttggaaaatttgtgtctgctaccatgagcttgacaacttaccagtacataaggaatttctaatgacgttagttggtatattaacaaatgtaattttaaaaaatatatgttgtttaatggaatgttttaacattttggaagatctacggccaggcgcggtggctcacgcctgtaatcccagcactttgggaggccgagatcagtggatcacaaggtcaggagatcaagaccatcctggctaacacggtgaaaccccgtctctactgaaaatacaaaaaactagccgagcgaggtggcaggcgtctgtaatcccagctactcgggaggctgaggcaggagaatggcatgaacccgggaggcggagcttgcagtgagcccaaatcgcatcactatactccagcctgggcgacaaagctagactgcatctcaaaaaaaaagaaaaaaatttttggaagatctttataactcagtgaacaaataattttccagtggaccagtgcttgcatgttacaaaatcatgcataaaagattcatgcacattgcaatataggggcacatgttcccaggatctcctgagggctgtgtcatgggccaaaaaaaaagaaagaaaaggaaaaaaattgcaagatagaccaatggattttaatgtaatagaatatggaaagttcattgatgcaatttcagattccacactgtaacaactttttttttttgagacagagtctagctcttgtcacccaggctggagtgcaatggcacaatctcggctcactgcaacctctgcctcccaggttcaagtgattctcctgcctcagcctcccgagtagctgggattacaggcgcccaccatgacgcctggctaatttttgtatttttaatagagatgggatttcaccatgttggccaggctggtctcgaactcctgacctcaaatggcccgcccacctcggcctcccaaagtgctgggattacaggcatgagccaccgcgcccggccatgtaacaacttttataaagttatgatgtgatgagttttggtgtaatgtttttccctcctctacctaaaacccttcatgccttcccattgctcttagaaaacactccccaatctgaaacatgacctaaaagccccctgccttgtctcatctcccacttcttaccctctctgaactccagccacattggttttctttcccttttgttaaacagctttattttgagataagccattaaatttacttgttttaaatgtgtgatttaaatgttttcacagagttttacagctatcaccacaatctaatttttttttgagacggagtctcgctctgtttctcaagctggagtacagtggcacgatctccgctcactgcaacctccacctccctgggttcaagcaattctcctgcctcagcctccctagtagctgggattacaggcacctgccaccacacccgactaatttttgtatttaatagagacggggtttcaccatgttagccaggctggtctagaactcctgacctcaagcgatccacctgcctcagccttccaaactgctgggattacaggcatgagccactgcgcctggcaccacaatatataattttagaacattttcctcaccccaaaaagaaatctcgtgtccattagcagtaacttaatattttcccctctccgccacttatccccagtccccctgcaactactaatttctgctataatatcaaggaggagtgagacccagaattatgtgaagaagctcttaaaatactactcccgccaatcacagtggctcatgcctgtaatcccagcactttgggaggccgaggcaggtggaccatttgaggtcaggagttcgagaccagcctggccaacatggtgaaatcccgtctgtactgaaaatacaaaattagctgggcatgatggcacacgcctgtaatcccagctatttgggagggtgaggcaggagaatcacttgaacctgggagacggaggttgcaggcggagtggagcagagatcgcaccactgcactccagcctgatcaacagagggagactccatctcaaaaaaaaaaaaaaaactactcccttttctacttgcgtttctgtgtatatgtagcctggatttttttgccttgtgttagccctttctctcaccgctataaagaagtacgtgcctgggcgccgtggctcacgcctgtagtcccatcactttaggaggctgagacatgtggatcacttgaggccaagagtttgagaccagcttgggcaacatggcgaaacctcgtctctattaaaaatacaaaaattagccaggcacggtggcacgccgcctgtagtcccagctatttgggaggctgaggtgggagaatcacttgaactccggaggcggagcctgtagtgagctgagatcgtggcactgccctctagcctgggtgaagagtgagaccctgtctaaaaaaaacaaaaacaaaacaaaagaccagcttggtggctcgtgcctgtaattccagcactttgggaggctgaggtggatggatcatgaggtcaggagattgagaccatcttggccaacaaggtgaagccccgtctctactaaaaatacaaaaagaaaattagctgggtgtggtggcgtgtgcccgtataatcccagccacttgggaggctaagtcacgagaatcactttaacccaggaggtggaggttgcagcgagctgagatcgtgccactgcactccagcctggtgacagagcgagactccgtctcaaaataaaataaaaaataaaaataaatgcctgaaactggataatttataaagaaaagagggttcagttggctcacagtaccacaggctgtacaggaagcatagcaacatctgcttctcaggaggcctctgggagcaacccatggcagaaggtaaagcatgagctctctctgttgcccaggctggagtgcaatggtgcaatctcgggtcactgcaacctccgccacctgggttcgagtgattctcctgcctcagccccccgagtaactgggattacaggcgcccactgccacgcctggctaatttttttgttttttttgttgttgttgttgttttttttttttttttttttttttgagacggagtctcgctctgtcgcccaggccggactgcggactgcagtggcgcaatctcggctcactgcaagctccgcttcccgggttcacgccattctcctgcctcagcctcccgagtagctgggactacaggcgcccaccaccgcgcccggctaattttttgtatttttagtagagacggggtttcaccttgttggccaggctggtcttgagctcctgacctcaggtgatcctcgtgtctcggcctcccaaagtgctgggattacaggcatgagccatagcacccggtgggggataacatttcagtatgagatttgggttcggacacagatccaaaccatatcgtgcctcagtcaaaataatgtgttgcagtaaattgaatacaaacacagatatatgaatccagctgtcttaaggtagacattaaagatatttgcagaatataaaatctgccactgttctcgcaaatttttttttgttttgaaaaatatataggtatcattatataacgtataatttatgattattttgttataaattaatatatctaaacaatttcttaagtttgtatgatagatataacccacataaacaaaggctcttggccaggcacagtggctcagacctgtaatcccagcactttaggaggccaaggtgggagttcaagaccagcctggccaacatgaagaagccccatctctactaaaaatacaaaaattagcttggcatggtggtacgtgcctgtagtcccagctacttgggaggctgaagcacaagaatcacttgaaccccaggaggcagaggttgcagtgagccgagatcgtgccactgccctccagcccggatggtagagcaagaccccatctcaaataataataataatggctcttaatgacatccttaatacattttaggaatctaaaagagtatcgtgtgacccagaggtttgagaattgctctgggagagatcagtgtctagaaagtcaaaaacaaaataattttgaggtaacatgcatttaaacaagtataagctaaaacagctcttagcaaaacagaatatctgcatgcccaaagagtttatacacatgtgtattttccctccataatgcatcttagaaactatagtttaaaaccataggttggcaaaccatggccaaatctagtgctctgcctgttttgtaaataaagttttatggaaacacagccacacttatttatttatcattggcagttttttactatagcagtggagttggatagtttcaacaggagagaccttatgatctgcaaagcctaaaatatttactgtctggctctttttttcccccttcctgaacctattaaattctcattgtagtcctttggagtctttaaatgttttatctgagtgctttgatatgttctctgagccttggactattaaccttttgggttctcttgtgccacagaatttatagtttcatgatttcttgggttcccacccaaggaattagttttcaagtttccctttaaggtaaacaaagctacaaaactgtttttctgtaaaaaagaataccataccaggaaaaccatatttatccctctagacttttctgtctgaactgcaaatggccaaatggagaccagaaccaggatttctgccccagtcagtcatttttccactataccatggttttaccttacacaggaagtggcaagaggggattgaaaaacggtgaaatggcaaatttggttttaaacatgcttagattgtggcgagaatgggatctcatactgaaattaatttattagtttgttgggaatgtgagaaccgtatctggggaaaagttcaaagctagataaaaggcgttcttaagagaggtttcttgtaaatgtcttaggattgtgagtttagccatgttgcttgtgccgtgtgctatgtcctatgagcccactccagacatatttaaataatttaatgacttggacgatggatcatgtatacaaatatagtagctcagaggttttatttgagtggagggaccgaataagagttaggtagacacggctgtatgtaattcagtctaattttaggctctttcattggttactcataaattaactgaataccttctgcgtacaaggtactactgtaggcattagaaatacaacagttgataaaacaagagcccctactcttgtgaaacttagtcgggaaaacaactaaaaatataagcatattctctactgtctggtggtaagtgctatgaaagaaaacaattaggccaggcatggtggctcacatctgtaatcccagcacttcaggaggccaagaagggagaatctcttgaggccaggagttcaagacgagcctgggcaacatagtgagaccccacctgtacaaaaaaatttttaaatttaggccaggcacggtggttcacgcctgtaatcccagcactttgggaggccaaggtgggtggatcacctgaggtcaggagttcaagaccagcctggccaatatggtgaaaccctgtctctactaaaaatacaaaaaatcagcagggcatggtggctggcgcctgtaatcccagctacttgggaggctgaggcaggagaatcatttgaacccaggaggtggaggttgcagtgagctgagatcgcgctgttgcactccagcctgggcaacaagagcaaaactctgtcttgggcggggcggggaagggggggcacaggaattggccgggtgcagtggctcacacctttaatgccagcactctgggaggccaaggcgggcagatagcttgagctccagagttcaagaccagcttgggcaacatggcaaaaccctgtctctaccaaaaatataaaaattagccaggcatggtggtgcatgcttgtattcccagctacttgggaggctgaggtaggagcattgcttgagcccaagaggcggaggttgcagtgaaccaagatcgtaccactgcactccagcctggtcaacagagcgaaaccctatctcaaaaatcagttaatcaaaaaaaatttttttaattagccaggcatggtggcatgcacctgtagtcccagctactcaggaggctgaggtgggaggatcacttgagccccagagtttgggactgtagcaagctgtaatcaagtcactggcactccagcctgaacaacagagaccctgtctctgaaaagaacaaaaatgagaaaaaaaatcaagcacggtaaggagatagagataaagtgcaggttgtgggcacttccctgcacctgcaattctcctacttcttccatttaggaaaataacaatagtaccaagtggaataaccttgaatctcctttaagttaaaccccaccaaaaggggggaaatcaattgcagacttttctactcttaaggagatttgtgacagttttcacactctcatcctgatattgtatcacaaggttactaagatggagaactgctggtataggcaaaatagtgaaatataactagtatgcttcttggataatccatgctttcccatttaaccatgcccagtttgtatatatatttgggacaagtgagaaaaataaatagtgccaaaatgtgaagcaatctaaagtaggaacttgccatatttggccagaaagtgggtgaaattgactctaaagcaattttaattttatcaagtgcattttaaaaaacattgttaatattacaaaaatgaaaatgttgacacaatagaagtagaaaaaacaaaaatctcagaaaatagaacacttttttccatgaggtagttgaaaaccttatacaccagtcagtagtctgcagaccaaaacatcatagcaagaaaatactcagcattctttttttttttcttgagacagagtcttgctctgtcacctaggctgaactgcagtggcatgaccaaggttcactgcaaccttgccctcccgggctcaagtgattctcccacctcagcttcccaagtagctgggactacaggcatgcaccaccacacccgactaattttttattttttgtagagatggggtctcaccatgttgcccaggctggtcttgaactcctgggctcaagtgatccacctgctacggcctcccaaattgttgagattacagatgtgagctgttgtgcccagccagcattcccttttattcatgctctcattcctttatcacttctggcattaccatgaaaatctttagatgtttatagggctataaatattaaagatgtcagttcaccaaatttttaaggaccagtacatccagaatagagaattaataaattgagtaagaattacattcagggctgagcacagtggctcacacctgtaatcccagcactttgggaggctgaggtgggtagatcacctgaggtcaggagtttgagaccagcctggccgacatggcgaaacccagtctctactaaaaatacaaacattagttgggtgtggtgccatgcacctgtagtcccaggtactcgggaggctgaggcacaagattgcttgaacccaggaggtggaggttgcagtgagacgagatcgtgccactgcactccagcctgggtgacagagcaagactctgtctcaaaaaaaaaaaaaaaaaattacattcagggccaggcaaaggggactcatacctgtaatcccagcacttgggaggctgaggtgggcaaattgcttgagctcaagagttcgaaacaagcctgggcaacatggcaaaaccctgtctcttcaaaaaatacaaaaattagcctggtgtggtagcgtatgcctgtagtcccagctccttcggaggctgaggtgagaggatggcttaagcccaggaggtagaagttgcagtgagccgagatcatgccactgcactccagcctgggtagcagagccagaccctgtctacaaaaaaaaaagaatttacatttagaacctggctacctaccttgtataaatggctagttgcaaataggtttttttttttttttttctgagatagggtctcactctgttgcccaggctgagtgcagtggtacaatcatggctcacagcatcctcaatcttacgggctcaggtgatcctcccatctcagccacccaagtagctgggactacaggcgtgcaccaccatgcctggttaatttttgtattttttgtaaagacagggtctcactgtattgcccaggctgttctcgaactcctggatgcatgtgttcctcccacctctgtctcccaaagtgctgggattactggcttgagccattgcacctggccacagaaggtgttttatttttatttacttatttttgcttttatggtttgtctctgggatgtagaaagtatcttaatgataagaatagtgtcacttaaaatttgtacggtatcccccttgtgatagttttgatactatacagataatagattatactccttaaattggtctttttggcatgaattgtacactatgcctttctttgtactttgcaattctctgtcaaaatctgctaagggggcagttagccatttgaatagctctactcttgctgccaacatgtactttttgccactctaataagtgataccacttattgtttgggtattgtctaatattagaaatactcagctgtgtgtggtggctgacgcctgcaatcccagcactttgggaggccaaggtgggtggattgcttgagcctaggagttcgagaccagcttgggcaacatggtgaaaccttgtctctacaaaaaatacaaaaattggccaggtgtggtggctcatgcctgtaatcccagcactttgggaggcccatgtggacagatcacgaggtcaggagatcaagaccatcctggctaacatggtgaaaccccctctctactaaaaaatacaaaaaaattagctgggcgtggtggcacatacccgtagtcccagctactcaggaggctgagacaggagtattgcttgaacccaggaggtggatgttgcagtgagctgagattgtgccattgcactccagcctgggcgacagagtgagactctatctcaaaaaaaaaaaaaaaaaaaaaaaaaaaaaatacaaaaattagccaggcatgatgacgcatgcctatagtcccagctacgtgggaagctgaggtaggaggatcacttgagcccaggaggtcaaggctgcagtgagccttgatcacaccactgcacacagtggctcatgcctgtaatcccagcacgttgggaggccgaggcaggtggatcacaaggtcaaaagttcgagaccagcctggccaagatggtgaaaccccatctctactaaaaataaaaaattagccgggcatggtggcaggtgcctgtagtcccagttactcgggaggctgaggcaggagaattccttgaacctgggaggcggaggttgcagtgagctgagatcatgccactgcactctagcctgggcgacagagcgagactccatctcaaaaaaaaaaaaaagaaagaaagaaagaaaagaaaaaggaagtggacactattatttctagtaagaactctatcagctacatcaccatgaagttatgatgatttaatcagatgttatataaattgatccagatagtgaaatcatcaagaaggggttttgaaataacaatatgtttatacttttggtatttaaaataaaaactttgcctaattatactgtgccttgaaattttagctaatggtattctgaaactattctaatttagcaagatatctaagcattcagaatgtaaaaactggcatttctagtttttttggaggtatttatttatgcattattctatatgacaaaattttactgaatttaattataaatgactggatgcatttcttgagggtttcttatttaaatagagaaagaaatactatggggaaacacttgttcctctgccatggtaattagcaaaaaacaatattacagccaatcaaaatgcattcattcattagcatatactgtttgatgcagcataaaaatgttgctaatgatattaaataaattagtaccagagcaaatttcccagcctggtagggataatgtacagatgtttctaacattaaagcttgggagtacttgctagattctatttcagtaatgaaacacatgaagaaccacttttgtgagcaattaaagagatatccacaaagatatattctcaactgtaaatcacttatttaacttttttgaatgtttgtggaaaaactaaacaaaaaccactgatggacggctttgactggaattaaaaaaataaatggagagttagggagagataccaccatgtgtgaaatttatttactacattatttctagaaaactatgatgacaaaagagattaatgccagatggcaaattggaagaccttcaaattacagtaagggtgaaggtgataatcatcttttatgatgcaaagattttacaagaggattcattgactctattatagcaaaatactttgataaagctgaacaacttttaaaagcgagtcatacattttttctcctttctccctctttctctctctgtttcctttgcttccttccttccttcttttttttttttttttttttttttgagagagagacagaattgcttagtcacccaggctggtctcgaactcctggcctcaaacaatcctcccacctcagcctcccaatatttcgggattacaggcatgagccaccttgactggcctatttttcttttatgaaaaatgaagtgttccaagtctgtttatcttttttataaagataaatggttgtctgcttaccagatacttttacaaagaatttatactgaatctgccccttcacgcttaaggaaagcttacttaacaagatgtcagaaaatagccaatttttgaaagaaactcatgcaatgaagagtgtattctgacaaacttacatcattgcatgatttgttattaaagagcgtttgtacgttagatgtgaaaatcctcatatctgcccagcttgggagcaattttctaacagaaaaatagcctaacagcccagattccagagcacgagtacatgggatccaattccagttctaacacttgactaatgatgtgatttgggggttggttagtaatcacttgtgcctcccttttcttatctacaaaatggatagaatagcatttacctagggttactttgagaatttaaatggaactatgtaagtaatagctataaaccagatgtaaaattttgtctttttagtgaattcacttgttaaaaatacaaaaaaaaattatctcacccatggtaataacaagaacaaaatgatgatgatgataatagtaataataataataaagtagaaagtaccaaaaactgtagaactttctgatctacagttcaatacagaaacaatgtattgatgttaaagattaaaatttactggctgaattttcacaaaaacttttgcatagttggagaattaggttgaaaaattagtgtcgtatttcagtaagcatggccaatcatgtgtcttccattttgatcttcttactttttcaagtataacaatatttaataccagatattaaaatgaatgcatttagaagatattcgaaagaatgaagcatgtgcattgatattgctatcactaaaaatagttatattttacaaatgtatacactatcagtgtagtagaatgtgtataaaatttataaacaaatatcttggggtatatgctcaattttttcccatggaagtatgagaacaacaagcttatttaacccgctgttacaagagtgatagcagacccctttatctggcatatttactcaggtatttaagtgagttaccatatgttccatatattgattagcaattgagtattggcactgcttatttacttattttgagtaactcctaataagatactagaatttttggaacttattcgtcataatttcctaaggaattatcaatctgtcttattcagtatatatctttggcagttttagaaagttgtaatggtggatctaatgattatttatcaaagccttttcgtcatctagtttttttgtttgttcgtttgagacaaggtcttgctctgtcgcccaagctggagtgcagtggtgcaatcttggctcactgcaacctcgacctcctgggctcaagtgatcctcccacctcagtctgccgagtagctaggactacaggtgtgcaccaccatgcccagctaattttttattttttgtagagacacagttttgccgtgttgcccaggctggtctcaaactcctggcctcaatcggtcggcccacctcagcccctccaaagtgctgggattacaagcatgtaccaccgcacccagctcatcatctagatttaaaagaatggagccatttgctgttccacgtgcaaatattgtttgtagtcccaatgaatatgtattcattgtcatttaactcattcctcttttaggagtgttatggtgtgtgtatgtatacatgcacatacatgtgcacacatgcctatacatgtacttaacatataacacaaagatttttttctaatgggactatactatagcctactttgttggtaatatctgtattatgtatatgagatggaaagaagacataatgtgaaatttagtgaaagctaataggaaaattaacatacagattttttgagatgacttctgatacattgagtgatgtctgttttgaataatttcagaggttttgggttaaaggtcgttagtttcatgcagtatctgaacccctgctaatttcaaatgctagacaggcttcctcaaaagcgtatttctatcagtgctgatcatgaagcattcaaataaagggaagtagagattctgttgagaatataatgaaatatctcttgttcttttgcttttaagaagcttattattagaaaactgggaacactttaacacatggaaaggtatagccatactggaaatgtcccaaggaagtttgtgacaaatgaccaaatctttttcagttttaaatgttttgagatgcaagattatatgtatttaggggaaaggaaaagggggacagtggtagagataaagcaaatggagtggaacgtgagctgggtcagaaaaaaaaaatgagtacaggccatttcaggcattgaacatcggtaggggagcagatgattcaggtgcaaagaaaatcactccagcactttgttctgagaaaaaatccacagtcagtgcagcttggttaaaaacaggaatgttcaaagaggtaccagtcttgtaggaatcaaatgctcatatgtatgaataaaggaatgtaaggttgagatcaatttgtggaagacatcatatgtcatgtaaggaagttagaccttgtaaaaggtaggaaatatctgcagcggtttttttttttaaagtaagaatgaaaattaattggattgataagatatattgggaaggaaactcttgaagataagaattttttctttttttttttttttttttgagatggaatttcgctcttgttacccagtctggagtgcaatggtgtgatctcagctcactgcaacctccgcctcccgggttcaagcgattcttctgcctcagcctcccgagtagctgtgattacaggcatgcaccagcacgcttggctgatttttgtatttttagtagagataggttttgttatgttggccagcctggtctcaaactcctaacctcaggtaatccgcccacctcagccttccaggtgctgggattacaggcatgagccaccgtgcccagccaataagaatttttcctaatgtctcacttgcgtgtcatcctcctattagatgatagcgcagttgctatcagtaaagacttgtatttagttatgtatactcggctcctaaaacagtgtctgacacatagtagttattttataaatcttggttgtatgaagaccatttaagagaagaccagtttaattatccactcagttctgtggtggagcctgacaacaagttagggaaaaaagaactgtggtaacaaggaagccagagctttatgctaccagcttccttcaaaagtcttagctaaagtggagctgctaagaagtaagatgtttgcttcagtagtatggccagggcaaatagcagtatatatcacatatttattttaaagtttttcataagctattattttatttaatcttatcgggatgggtgttcttgttaattactttatatatatatatatattttttttttttttttttttttttttttgagatggagtcttgccctgtcgcccaggctggagtgtaatggtgtggtcttggctcactgcaacctccgcctcccaggttcaagcgattctcctgcctcagcctcccgagtagctgggattataggcgcccgccaccacgcctggctaatttttattatttttagtagagacagggtttcaccatgttggccaaggctggtttcaaattcctgacctcaggtgatctgcctgcctcggcctcccaaagtgctgggatcacaggcgtgagccaccgcacctggccttttgttaattacttttaaaggcagtagtaatatcaaataatatttaagcctaatctaagataatctttttctacagatttttagttacaaatccccagatatttccttgtaaacataatttctattattttttcaaagtctcccttcttaaaaaaaaatcttatttatatatactactttgtcgttaacagactcttttcaccttttgttttaattcttaaaataaccttatatgaggttagtaggaatttttgtccatatgacgggtggggaacagggtttagaatgatttagcccaaagtcacatagctaatgtatgattaaatttgtatttagagttaaatgtggggagactaaataagaggttatttgcaagggtaaagtggatcagaactggaatttagtcctagtttcaccactttaccctatgatgctcttagacactttttttttttttttttttttttttttttttttttttgagatggagtctctctctgtcacccaggctggagtgcagtggagcgatctcagctcactgcaacctctgcctcccagattcaagcgattctactgcctcagcctcccgagtagctgggactacaggcacgtgccaccacacctggctaattttttgtatttttagtagagatgggtttcaccatgttagccaggatggtctcgatctcctaagctcaggatctgcccgcctcagcctcccaaagtgctggggttacaggcgtgagccaccacgcccagcctcttagacacttttctttgttttttgtttgtttgttttttggagtttttttgagacagggtctcaccccgttacccaggctggaatacagtgacatgatcacagctcacttcagcctcaacctcccaggcttgagtgatcctcccacctcagcctcccaagtagctggaaccacagttgcatgccgccacccccactgattttttttttttaagagagagaatctccctgtgtgttgccctggctggtctcatactcctgagctcaagtgatcctcccacctcaaccttccaaattgctgggattacaggtgtaaaccaccgcactcagcaatcttaaacactttttatggcctcagtttctatgtgtaaaatggggatacctactttagttcctgtggacctgcactgtccagtatagtggccacttgccacgtgtggatattgagcacttaaaatgtgactagtccggccgggcgctgtggtcacgcctgtaatcccagcattttgggaggccgaggcgggtggatcacctgaggttggaagtttgagaccactctgaccaacatggaaaaaccccatctctactaaaaatacaaaattagctgggcatggtagcgcatgcctgtaatcccagcttctcaggaggctgaggcaggagaatcgcttgaacccaggaggcaggagaatcgcttgaacccaggcggcagaggttgcggtgaactgagatcgcgccattgcactccagcctgggcaacaagagtgaaaaactccttctcaaaaaaaaaaaaaaaacgactagtccaaattgagattgctgttaagtgtaaaatacatgccagatttcgaagacttactttgttttcttttacatactatcttattgtgttgctttttttatatgagttccatgttgaaatgacagtattatagatacgttgtgttaaaattgtcacctattttaacttaaaaatgtgtctactagaaatttttaaaaatatatatgtggtttgcattatatttctgttggccagcactgctctagaccaaggatagcaaactctgacaccccaaatccagacagatgcctgtttttgtaaataaaattttattggaacatagtcacacccctttgtttataaattgtatgtggctgctttcatgctatatgagcagagttctgtggttgctccaaaaccctgtggcttgcaaagcctaacatatttactatttgatcctttgcagaaaaagtttgctgcctctgctcaactgtagttgacagatgttcaatatgttacctttacttaagagcggctatggtaaagacaaagacagaaagtagaatcatggttgccagtgagaaaagaggagctgggagtaaacgctaatcattacagagtttctttttggggattaaataataattttgaggctgggagcagctcacgcctataatcccaacactttgggaggccaaggcggatcacttaaggtcaggagttcgagaccagcctggctgacatggtgaaatcccatctctattaaaaatataaaaattatacagatgtggtggtgggcacctgtaatcccagctactcgggaggctgaggccggagaattgcttgaacctgggaggcagaggttgcagtgagctgagatcatggcactgcagtccagcctgggtgacagagcgagactccgtctcaaaaaaaaccaaaaaataataattttgatagttgtgcaacttcagatatactaaaaaccactgaattgtgtacctttaaaagggtgactattatggtatgtggatatctccacatatcttttttttttaagtggatatgagtctagtttagtacatgtaataaagcagtatattaattatacatactgtaataaaacagtgtattaaacatacatgttaatgataatgagaacatgcagcaaaatgaacaatgcaaatcaattatgaggtcagtaaaaaaaatttatttttttaatgtaatctcttgtcaaagacaatttttaatcactttgaatagatcatgtcacttgagcatatatgcaggttttttattggtaggaaaagcagttttctgtcattgcttactcacttgctcagattcatttactgcctttaagatagtgtgcagtactttgagaggccacggcgggcagagcacaaggtcaggagtttgagaccagcctggccaacatggtgaagccctgtctctactaaaaatacaaaaattagccaggcatggtggcaggtgcctgtaatcccatctactcctgaggctgaggcaggagaattgcttgaacccaggaggtggaagttacagtgagccgagatcacgccactgcactccagcctgggtgacagagcaagactccatctcagaaaaaaaaaaaaagatagtgtgcagtagtatatacatagctgatctcaataaatagctaaataagtgaatacaaagtataaaaatactattttataaacgttaattctcttttggaagcacttattgaaatacagaaattatggcttatttcgtttttagcaagcttttgaaaggatagaataatattaggagaagggaattggaatatcattcgaaaacagccataacttgtatgcgtataggtattttatctggattgaagtattaaacatctgtatacaaatcctaggtattttcacattgctttgaaactgacaaaatattacctgctatgtacaattgactcattaatttgttatacataggatacagcaacaatctgctttatgcaatccaaaaactgataatcaccacataatttttcatctgaatatgttgcaataggttttaattttattgctttgaaaacaccgtattacagtactgtatttatgacgtaacttatattagcatgatgtggaagggcacaggctttggagccagacagacctagttcctaattatgacttagtttactaacaatatgatgtggtaacaatttagttaatatttaacatctctaagttttcatttcctcatctctaaaatgggactaataccttctccagcaagtttcttttaaggaataaataagaaaatgagtacagaatacttaacacatagtaaccactcactcaatggtaacctcatatgattatttttgccacttaatatgttaagttttttaaatcaaacattaatttttttttagttgtcagcatcatacatttcattatgtattttactgactcctacttattcaaaaacataacaaaatattaagtaacattctattttactttcagtcaaagaaaaataagaagaaatcaaagtcagatgctaaagcagtgcaaaacagttcacgccatgatggaaaggaagttgatgaaggtacttgagcaagggaaaggactgtagaaaattttttaatccttttttatcaaagtgtattatataaaagctgcatttgttttacttaattttgtgtttagctcttcttttttattactgtagaccttaatatatagagctgtgacactgttaggaaacgcttttgttaaggatccagtagtgctttttctgaagggaactgccctgaaatttaaagtcaagctcagtattttgagcaattaaaaagtcattcatcttgtctttgtctcctggaattatggtttgtttgtttttcccccgtggttcttaaatataccatttattatcaccacctaataaacccatttattagtgattatatataatactcctgtcacttctacctagcaagataaaaaaagatagacaagatgacttatatatatcactttttctaaaccatagatgacagatttgataaaaattaccagaataaataataacagttgcctaaaacaacataatgaaattagaaaacattcttaggatgagttaatataatcaacactcttggttttagcttaacatctaaatttatcatgatattttatgtgctccaccccatattctcccccaaaactataacttttttgtcttccccttactgaataacattttttttctggggctatgtcaggagcctgggaaactaaaattagtcacagagagaaacgacagcagcgtaaacgtgataaggtgctgactgattctggttcattggattcaactatccctgggatagaaaataccatcacagttaccaccgagcaacttacaaccgcatcatttcctgttggttccaagaagaataaaggtatattagtggaacataagacagtggtacatcaaatcaaactccttttattcggatgtacaaaatatcattatgtcaaaatctgactattttgaatgctaacatcattgtgctgatatacccttcttcatgagagtattgtgaaccatgtatcggtttaccgaataccagcagtgttacttgttacgtattgcctaatgactggcctattaaattaaaatttgcctttctgccttgagtcatatgagaaaatgatgttgccacttttctagtgcgtatcactttgccccaactcccttgcatctctgttccttagagtggataagacatttattaaatgaaatgatttatcaccattttgcatgttgagagctttcattccaagatgaatcatgcatgttctggtgagtgcaggttgtgtctggatttcttatcaccccacctttttgagaatattatagatgtttgatagagctagaccagaacttcaaagattgagctaatgttctttctctcaagtattaatatttcagatgttcatactatccaatactggtggcttcttggtagcccactctttaaattaccgtcatttttaccctggagacaccagtctgcaaagtgatactgttcaatttgctggaaggcattggcgtatcttccttgtctttttgttaatgaccttcccacctccccacacctcagttgtttccaaaccattttcttagccttgttaccttttattttttgcttgataacttggtggaatttattgccatggtacagcaatgacttctacttacccattttcactgttacatattagctatgctttagtatttttgttgattctttttcgctgtcttgtgcatgccatccttgctagcacaatcctatgtcatgctggtttttttaaacattgtgatcattatgctttttagtgtcagagaaatagtatttttgtgttataatgtgtattctcacctcttgccatatttcctaagtcctggtcccaaatactggcaaagttcttcataaggtgatgtgtttgcttccaggattgttgaaaaggcagcgggtgttgttgagaggtggcaaagttgaatccaattacagagcccaatactgcagttcatacttaaaataatcttgataactgttgtagaatagcaaactctgtctgtacataggcagttttccaggttctttttggcattttagttgactaagaatatggtaaccagaaaactcagttccttaccaacaagtgaaatgtgttgtaaaattgacttttttccagtggaagaatttagcacttgaaggagcaatttataatagataataattaaaaattaatttatgtgttactcctaatttaatgtgcatagtgccctatttagtattaaataaattttatttctattttaaccaggtgattctcatctaaatgttcaagttagcaactttaaatctggaaaaggagattctacacttcagggtgagagaaattacatgtaacttaaattgaaggcccatcaaaatagaaatttatatacatacctctttcctcaaatgaatgacacagaaggaaagaaaaaagtcttaaaatgatttttaattaataaagtaacataatcacagtacagagattttggaaaataaataaaaagaaaaatcacacccacttctaacgatctttgatatgttctagtctttttcccccatatataaaaacattcagtagtcgcttatattgcaactttgaaccttgtcacttaagtcagtagagaagaaagatttttgttgggcttgggtttaatatagcatatatcggataaaatacttgatgcttgtatgttaaaaaaaaaaaaagctttagttcctataatgttttaactgcttccttgacagtcaagtatcaaatatttcacaatggattataggctaaagtttttcattgctttataaatagaaaatatgttttatttactcatttatgataaagattgaattaagtagagtgttatgcctgacctgaaaacaaaagtgttgtagtaaaataaaattggaaatgaaaaaagcaccttcttctttcaggcctttttttttttttttttgggaaatggaatttcacccttgttgcccaggctggagtgtaatggcatggttttggctcactgcaacctccacctcccgggtgcaagcaattctcctgcctcagcctcccgagtagcagggattacaggcgcccaccaccatacctggctaatttttttattttttagtagagatggggtttcaccttgttggccaggctggtctcgaactcctgacctcaggtgatccacccactgcagcctcccaaagtgctggaattacaggcatcaggctttttttttttttttttaaagacagagttttgcttgttgtccaggctggagtgcaatggcacaatctcggctcactgcaacctccgcctcctgggttcaaacaattctgcttcagcctcctgagtagctgggattacaggcacttgcaactacgcctggctaattttgtgtttttagtagaggcagggtttcaccatgttggccaggctagtcttgaacccttgacctcaggtcatctgcctgcccccagcctcccaaagtgctgggattacaagtgtgagccactgcgcccagcctcatttcacacttttcagtgcttgttcttagcactgtcagcttccttcatgcccatgattctcaaccctggctacacattagttatccaggaagctgtaaaaaacaacatgtacacacatatatgtaaaaagaaacaggtacttatctatacacacacctatgtgtatttgtgtgtgtgtacatacatacactctacatatataatgatacctgggctccaccacaaagattcagattttaattggtctgggctgaggctccagggtctattgttaataaatttttcagttaattttaatgtgcagccaggttttagaatcattgcttgatacataatgtaatatatataaataaggaaagaacatgtaactaaggaaatgtcttcatattcttagtgggtgagtattcagaatatgtgtcattttcctctttgctctgttgtactttctttgagcaagttattctgctgtgaacaactttgttagtatatatgttatgttcaagcctcctgtttttaaattaaggcaatccttggtgatcaaaggatagtaggggaagtgagtaataaatataagtcaagcaatcatagaaatgtgaaaatatcccagttttaagaagtcatgtacctgttttttaatattcattttcttttctttaagtttcttcaggattgaatgaaaacctcactgtcaatggaggaggctggaatgaaaagtctgtaaaactctcctcacagatcagtgcaggtgaggagaagtggaactccgtttcacctgcttctgcaggaaagaggaaaactgagccatctgcctggagtcaagacactggagatgctaatacaaatggaaaagactggggaaggagttggagtgaccgttcaatattttctggcattggtaagaagtgttagaaaaatttaactttatttaaaattactaatcttgtacatttttaatttttcagaaatagaaaaaaaaactatgaatagaaaaataagtactgctctgcagaaataatagtaataattaactcatctcacatcctttttgtagagcaaggtgggaattaaataagtaaataacatcatttactctttacatagtgctttcacatactttatcacatttgattatcaacatagctaactggtgtaattatatattcttagtgatgtgatacatgtaatgtgtgggtagactttttgattaatttcaacaattctgttgagtctaaataaaaatagtaaatggaagtacagttgataacatccacttatattttacagtctgcatggtgcctatttataattaaattttcctccggattttaatataaagaccagtagttgagaagtttatttctgttgagagctatcaagttaaaagcagcttaatttgtgtgtgtgtgtgtttgtgtgtgtgtgtgtgtgtattatagaaaagaaatccacattacatgtgggcaattgcaaaatgataaggaaaatcccaaaatgccacctagtgacaactgctgttatttatatttcttctccctccctttctcctgcccgcaactgtatatagtgttttttgttgttttttgtttgtttgtttgtttgtttttttaatggagtcttgctctgtctcccaggctggagtgcagtggcgcgatctcagctcactgcaacctccacctcccgggttcaagcgattctcctacctcagcctcccgagtagctgggattatagacatggcatcaccatacctggctaatttttctatttttagtagggacggggttttgccatgttggcgaggctgatcgtgaactcctgacctcagatgatctgccagcctcggcctcccaaagtgctgggatttacaggcgtgcgccatcgcacccggcctatagttttgctttagtgtttttgtttttgatgtaattcaagttgaatatgcatgtttatgtctcccctagtccccacttaacattgtaacataaacattttccttactttttgtaagtatatttaatggccctataatgtttaaggatagcataacttacttaactattcccatattattcaagaagtaattttccttttttttttgagatggagtctcactctgtcgctgtcacgctggagtgcaatggcatgatctcggctcacaacaccctctgcctcctgggttcaagcaattctcttgcctcagcctcccaagtagctgggattacaggcatacgccaccaaactcagctaattatttttttgtatttttagtagagacggggtttcaccatgttggccaggctggtttcaaactcctgacctcaagtgatccacccacctcggccttctaaagtgttaggattacaggccacggcgcccagccaattttcctttttttaaccattgtagataatgtttcacggaatatatttgtttgggatttttttgttgtggtttttaagatggggtctctctctgttacccaggctggagtgcagtggcatgatttcagctctctacaacctctgcctcctgggttcaagcatttctcatgcctcagccacccgagtagttgggattacaggcgcacaccaccacacttggctaatttttgtatttttttagtagaggtggggtttcaccatgttggccacactggtctagaactcttgacctcaagttgtcttcctaccccagcctcccaaagtgctgggattacaggtgtgagccaccacacctggccatgttttgcggttatttcttaaggacagagtcttgtgagtgatattggattaaagggaatatggatgtttgtaatgctctactacatagtgcctaagtattttctaagagagttgttctaatttatactcaaagcatcagtataagtgcccatttatcatatgcttaccaaggttggggattttttttttccgccttttctaattcgataagcaaaaagtacgtaaattattttggttaactttttgaaatcactgatgagattgaaaagttttccacaactttcttggtcatttctttttttgtttgcttgtttgtttgtttgagacggagtctcgctctgtcgcccaggctggagtgcagtgcaatctcagctcactgcaacctccacctctcaggttcaagtgattctcctgcctcagcctcctaagtagctgggattacaggggcctgtcaccacaaccggctaatttttgtacttttagtagagacaggccatgttggccaggctggtctcaaactcctgacctcatgattcacctaccttggcctcccaaagtactgggatgacaggcgtgagccaccatgcccagccgtttcttggtcatttctatttcttttatgaattgtctgttcttgttattttcccatttgtctaatgagctcttcatgtttttttgttttgttttgtttttaattttttgagacagggtcgtactctgttgtccaggctggagtgcagtggtgtgatcattgctcactgcagcctcgacttccagggctcaaaagatcttcctgccttagccttcttagtagctgggaccacaggcatgtgccaccacacctggctaattttggtatttttttgtagagacagtttcgccatgttgccctggctggtctcaaactcttgggctcaagtgatccacctgcctcggcttctcacagtgctgggattacagatgtgggccaccacatctgcctactattttattttttaaatctagttatactttcttgtgcattaaacatacgattttttctcttgtgcttatggcagatatttttatctgctctaatttgagggagcaatagatactagaaactttttagttttagtatgtaagtagaaaaatatttcttcctttgttgttaggctttttccggaacttttttttttttttgaaatggagttttgcccttgttgcctaggctggagtgcaatggcacgatctcggctcaccacaaccaccgcctctcgggttcaagcaattctcctgcctcagcctcctgagtagcctggattacaggcgtgcgccaccacgcctggctaattttgtatttttagtagagatggggtttctccatgttggtcaggctggtctcgaactcccagtctcaggtgatccacctgccttagcctcccaaagtactgggattacacgtgtgagccaccaacactggcccctctcttttaaagctaacaccctcaaaaatcaaacaccagatcatttaattatattgtttttaagcttgctctcccttcctccccattatattgaaaaattgtgtagcggtatcaaaacttgtttgaaagagacattcccttgcctgggcatggtggctcatgtctgtaatcctggcactttgcagggctgaggctggcagatcgcctgagcccaggagttccaagaccagcctgggcaacatggtgaaaccttgtctgtactaaaatacaaaaaaatcgctgggcatggtggcacgtgcctgtaatcccagctactcgggaggccgagacgggacaattgcttaaacctgggaagcggagattgcagtgagccaaggtcgagccactgcactccagccttggcaacagagcgagactccctctcaaaaagaaaaaaaaaaagaccttccctaaattcccactctcatttttagcagagaagaaagcattaatttctgtgctataaagcatcctttcatatttggtaaaagaaatggttgaattttatggagtaatgttaggaaccgtgtgaccttttgggatatttacaatttgcaatttgctgctgcctttttttttttttttctttaagatggaggcttgttctgtcacccaggctggactgcagtggcacaatcttggctcactgcaacctcacctcccgggtcccagttcaagcaattctcctgcctcagcctcctgagtagctgggattacaggcacgtgtcaccatgcccagctaatttttgtatttttagtagaaataggctctcaccatgttggccaggctggtcttgaactcctgacctcataatctgcccgcctcggccccccaaaatgctgggtttagaggcatgagccactccgcccagcctacaatttacttgtaaaagttatatagcatttcataattaggacataaattagatggtatttgcttaatgttgttacagataatattaaacagcaaattagagttcctgcctagatagactaggacttttatggaaaatgaaagggaactatattaaattagatttgtaatgggtcactggaaagagacagatgtgactcgtctcatggaggtttacgttctttaaaataagaaatgtcttgaaaatattgagaaagtagcatggtatagaggagtgaacagggactggttcagacagatctattaggtatgaatctctattcttctacatgatagcttttatggacattcaggctagttatttaacctgtatgaacctcatacttatgtaattgtgaggatttgttgtaatgaaagtcaagtaccaagttcagtgctatcccaaagtagttgcttaattatgataaataataatgcagcttggtatagtggaaaagagcataggctttgggaattgacttaagctgcattcgtggctcagctgttttctagctatcagcaagtcacttaattgctccaaaactgcctagcaaagtttctgtaaggattagaagtggttggtgtaaggggcccagctacgtaataaatattcagtaaatagtagctattactatattaagtggttctcatttctaaggttatctttaaatagtctcatagttttaaatctttacatatctttcaagtctgatgcaagttgaaggttccaagtgatgttttttattttaacagctgcttggtctagtgtggataggggaatgaatacctctgaacagaattctgcttcttttgcatctctcacacttaactctgctgtttctggtatgtgaaaaacagtcttttgttcagctaacaaaaacatttgtttaattttagtgcttgttatttgaaaaactaatcaacatcaagtactgctatcaatataaatagcaggtattataaagtggcagaggcctttacaacaggaagagaagacctaaattcttatgtgcaaatggcttaattcccctctctaggggagtaaggattctgtagcttgagatcactgacagtgtattggcacacagacaaatacacatgcaaggccttccattcaggttcatattcttctgttgctaatgtagtcctgccatacttttagttacaatttgacattttacttctgttcaccgttactcatcatgagtttaaaactaaccctttcaggttatggattcccacataataactataagtatctgtagatttataaaatacatgattactaataaactactgttaattctgcattacttaaatggatatatgttttattaatcatatagaaactacatgtatttaacaaatattacataaatatgggaggccaggtgtggtggctcacatctctaatcccagcacgtagcgaggctgaggtgggaagatcacttgagcctaggagttcaagaccagcctgggcaactacatcaccacataaagttaaagaaaaattagccaggcatggtggtatttgcctgtggtcccagctactcaggaggctgtggtgggaggatcgcattagtccaggaggttgaagctacaatgagcaatgagccatgattgctccactgcactccagactgggtgacagagtgagactctgtctcacaaaaaaaaaaatatatatatatatatatatattttttttttgtggacccagtttactaattttgtagttccgcagcgtctggaatcactaacctagaaagggggtcagcaaactttttgtataaagggacagatagtaaacattttaggcattgtgggccgtgcagcctctattgcagttactcaaccctgctgttgtaacaggaaagcaacctgagacagtaagcaaatgactttctggttccaaaatattattatttcggtttttttttttttttttttttttgagacggagtctcgctttgttgccaggctggagtgcagtggcgcaatctcggctcacggcaacctccgcctccctggttcaaacgattctcctgcctcggcgtcccatgtatctggtactgcaggcacgtgccaccacacccggctaattttttgtatttttagtagagacagtgttttaccgtgttagccaggatggtctgcatctctttacctcgtgatccacctgccttggcctcccaaagtgctgggattacaggcatgagccaccgcacctggcctgattttttttttaaccatttaaaaatgtaagaactattcttggctcatggaccatataaaaaccggatggttggatttggtctgtgagtcatagtttgctaaactctggtctcatagactacatttcatttccagaggtacaagtttattgcttcctcatttggtgactctgtacaacacacatgctattcccttcatatatgcagagaaagccgtgtgggctgccaaaggaatagcaccagtgttacagtactgcttctaagcagctaatatattaatacatgtgaattttatagggttactctgtttatagggttactctgttaaagtttacattaaaatatacatattaaacatacatatagagagagtatatcaagcagataatatattagtggaatgctgctggtaagatcatctgtaaccaagaagaaatttataaattagtagtaaggactcacgtgggaggacgtgattgtatgtaacacttttatactaaccaagtatcttttcttcctaaccatttctttatacagtggctctgaatccaaaatacatatcagagtcatctaaggactccagtacacatgtaaattccaattcagaaggggtgtatgtgtgtgtgcgcacgcctgatggaaaaccactgctttacatttgcatcctaaagtgaatttatatctataaagcaaggggtttgacctggcatcagtgaactcatatgcccccaaaactatatgcagaattttgtgttaagctctggatagtagactgccacagctttcatcaggttcctaaaagactatgtgaacccactctcacccgacctactaccctcacctgagaaaaaacaaaaacagacaaaacttatgagataatattttgttttctttaaatgcacttgaacttagtctctagacctcctgcaactcttcttgtctctttggcttctctctgcctcacctctctagataaccacctatttctctaatgtttcttagccaaaagatgctagctaactcagacattttctagttccctctttcaaggttctgaggatacatagccctgaaacatccaggactaaaatgatcaatggcagagatttctattgtgttttattttccattaagaagaaggaaaaaacaactttttttgacttcttgaaatttgtaggcagggcacagtggtttatgcctgtaatcccagcactttgggaggcagaggaggatccctgtagaccaggagttcaggaccagcctgggcaacacagggaagaccctatctctacgaaaaattttttaaaaataagccaggagaccaggcaaggtggcttatgcctgtaatcccagcactttgggaggctgaggcaggaggatcacttaagcctaggagttcaagaccagcctgggcaacatggtgtaaaaccccatctctacaaaaaatacaaaaattagctgggtatggtaatgtgtgcctgtagtcccagctacttgggaggctgaggtaggtgaattgcttgagctgaggaggcagaaattgcagtgagccgagactgtgccactacactccggcctgggcaacaaagtgagactctgtctcgaaaaaagaaaaaaagcccagcatggtggtacaagcctgtggttccagctgaggtaggaggatctcttgagcctgcgaggttgaggctgcagtgagccacgatcatgccactgcacttcagcctgggtgacagagtgagatcctgtctcaaaaaaaaaaaaagagagaaatttataggtaacttaccagttggtgtataatacaaaacacaaaatctaatggattggtgctagggaaaacatagatttctgatcattgaattagatcaagtgattatcatagttaatctaaaattaccctcaattctacttttccttttaacttaattctttttctaatgtctgaatttttccttttaggagaaattttaaaaataaagtctccgtgtcaaagtatagaactattgttatgaaacatcattaggaaattccatttttaattttattgcattcgtttttcatttaagggtctactgctgagccagtttctcagtctaccacttctgattatcagtgggatgttagccgtaatcaaccctatatcgatgatgaatggtctgggttaagtatgtccttttaaaaattatcagttattttttttcagagttttctttctagcaccctgaattcatgctttatgttttaattttaattctaatttctcacctttaaaggtcataagaatataatttaataccaaatgtactacttgaaacctgattattgaatacctgtagaattaaaactgaattttcgtaattgaggcaatatttaaacaaagttttcttctagttgctctgtagtatttctagtttttaaattttttgttttaaatgaatgtctgtttctcctcctaggtagtataatagactgaattaaatatacagaaatggctttgtatttgtgaagtatacacacatttttgtgccggtagaaaactactttcttaacccagttgccagtagaagtttagttaaaggaagacattttagaagggaagaatatggtttgtatgttcggaaagctcatgccgtcttcatttaaaaaaaaaaaattatgagttttttttcctcacaaacctaaatctcaaaatgtactttgtctgaatttttatttcacatccttttttactatttactgttttctactgttagcacttatatgttccctgtggggttttccaccatttttaagcatatgttttccttctccaagtagagttaagaactctctgaaaatggggactagcactctttcatacactcaggacctagtgcaagcctttatacataggtgttcggtggtaataataatgacaataaaaacactggactatgtgccaggcactggtcttagtcttttggattttattatctcatttaatgcttaaaacatttctatgtggtaggttttatttgtttccacactttccagatgaaaaagttgtgacaagggaaagttatctagcttttcccaggccacacagttagttaaatggaggagggtggtattcataccttgctagtctggctctagagttcatgctcttaaccactatctggtacagccttggtgatgatagtaatcatcaaggtaagctggcgacacagtggttaaagcacagttcttacagattaagggagatgaggagagaaagatcagggaggaccatattgtgaaatgcatgccttgaattgctggctaaaggttagggggctgggggttttcagtactagcttagacagtagatacgaattttagtcccgactctaaaatgtagtagtacctcatatggttagggctttgtcacttgtctgggagctgtaaaatcgagcaaataatgtgtcatatctgttttcataggttgttgtgaggctttaatgagataatgggtgaacatgaaagctctgtaaattacagtcatctctcagtatccatggggggttgattccaggacccccctcaggtaccaaaatccccaggtgctgaagtctcctgtgataaaatggcatagtatttgcatataacctacatatgtcttcccatatattttaaattatctcttgattacttgtagtaactaatacagtgtaaatagttgttatactgtattgtttagggaataatgacaagaaaaaaaagtgtgtacatattcagtacagacacagttcattcattttttttcctgaatatttttgaacccacaaatggaaaacccatggatacgcagggctgactgtgtatgaagtatttaaatccaaggttttacaaggatgtgaaagcactatttttggggaaaaaaataaacagtatatttgtgctttaggaagaattatcagctatatgcagaatagaattgaggatgattataacaatgataggagtgactataggaaaatagcagtaaggtatcttgggctgctgtgggttgaggcagaggaaaattgagtggacaggtctccaggctttcctgcttggacagaatagatgcactttttattttatccatattaagatactttgaatatgaaaaacatgattagctgctaaaataaaagatttttaaaacatgtatccacaggattctatacttaatcaaagtaatatgtatcagaaacaccatcttcctcaagtttgttatgctgtattggcagtctttttaagtccagagtttctctttaacattttctctgtaaactttattttctgtgtcaccatctttaatgcagctctatttttggtgctcagtgaatttagttattacttctgaatttctaaaatgaatgatttagtattttagattacaaatccacaaagtatattacattagatttacatttacagtatgatataattaacatattggccctccagtttgaagacatacattaatctattactatcttgaccataaaggaacagcattattgtaacccatgtaaaaagtcagatgttgaatagaactttttcttggcacacaggggtgaatgaattcgcttcagcataatggagtggttgagagcatgagctttcaggacagactacctgggtttcaatcttaacttccctgcctttgcccatatgcaggttacatgattattctatgcctcaatttccttctctgtaaaaataacaattcctcccaaacagtacggctgagaagattaaatgagttaatacatataaagctcttagaacactgcctcacatatagtaaatatgcagtaagtactgctgttggtatccttctagtggcaaaattagtctaaccaatgtggttaactaacccaatgttgttaacactggagaatgtctaacataattgttttcttttattaaaaagttattaaagtttacattgaattaagttctgacaagaaacagctgacaaccaaataaagaccagcaatgagatgcttaaacctaaaacattattccataagtgaattaaatggagagacaaattctttacccttttgaaaagaaaaccagtatggctctttgaaaagaattaagttctgacaagaaacagctgacaaccaaataaagactagcgaagagatacttaaacctaaaatgttattccataagcaaattaaatgaagagacaaattccttacccttttgaaaagaaaaccagtatggctctttgaaaagacattggcagactaatggaaaactttagcgataagaaattataattgaagcaaactatactgtgaatcatttttaagggaactatgtctaagaagttttttggtacattaggcctatgaatcttaagaattagttacccaggccggtgccatggctcacacttgtaatcccagcactttgggaagccaaggtgcaaggatttcttgagcccacgcgttcaagaccagcctaggcagcatagtgagaccccatctctacaaaaaaaaattagctgggcgtggttcgcatgcctgtagtcccagctactcaggagtctgaagtggaagatcacttgagcctgagaagtctaggctacagtgtgccatgatcttgccactgcactccagcctgggcaatagagcgagaccctgtcataaaaaatacttttactaagcattttactcgatttttatttttcacctccacctcctaccacatgtattaagaaaatgggtgacatgttggtatattgcccactcaattgcctaaactttcttctgcttaatagtttcttttctggcaagaagtcttagagacatggcttatggacggcaattttcaaaatctgggtttcttatctgtgagatttaagcaaagccactgatagcttggtatgtgaacctcctaaagtattattaatgaatggttggtataagatgagtagttggttccagacatctactagactgaattgaagtatatcttacatatgaagtatatcttaatgagaggttcatcagaattgtgagaaataaatttttaactatacatgccttatagattagaaactggttttaatatcatcagtgataataaaaacagtagctaccatttattgagcgcttactgcattgccatgaattgctttacatgtatctcatataatcctctcagcaatcctatgaagttgataatagagcccattaagaaacttgaccaaaatcatcttgttattaagtggtagaacaatattcaaatgtatatttgtttgacatgaagacccatgctcttcgcctctgtgctactatgtaatactgactccagatacttgctcatggtggtgaatttagaaatacaggaaggaacttccttttttataacacatttcacacttgtaatcacctgttccatgtttttcctccactaggctataaattcttatgttgtctctccctgtcctccactagcttagctcttctttgtttccacagcccccatggcagaatctgtcactctgtatttaatagtttgttaagcttacctatcttcacccctgaatagacagactacaagctgcacgtgcagaaggattctattttacttgtttttctatctctagtacctacctagctcaagttctagcacatagtaagtgcttaataaggattggatagatgtaatttcactattaaaatatatttattattccaacctgggcaatatagtgaatccccttctctacaaaaagtttaaaaattagccaggcatggtggcacatggctgtggtcccagctgctcaggaggctgaggcaggaggatcacttgagccccaggaggttaaggctgcagtgaactatgattataccactgcagtccagcctgggtgacagaataagaccctgtctcttaaactaagaaaatatatatatattatatacatataatgttttatttttttctgtctcttcctcataaatttgagatcatactgtgtagacaattttgtctatgattttttttctgtgagcgttttcccagattattatatattcttccaaaacctagattttaaaactttcataagaatgtattatatattcctgttaaacaaaaacaataatagagttcacctggaaaaataagactagcagaaagtaaataggagtactaaataagagtaatgcaaacaaatttgtccttctagatataaaaatgtattgcagagttatgtatagcactgtcccaggaatagatcagtggaatagaatagaaattgcagaaacagactgaagtgcatataaaagaattgagtaaggccgggcacagtggctcacgcctgtaatcccaacactttgggaggctgaggcaggtggatcaagaggtcaggagttcgagaccagcctgaccaacatggtgaaaccctgtttctactaaaaatacaaaaattagccgggtgtggtggtgcacgcctgtaatcccagctacttgggaggctgaggcaggagaatcgcttgaacccgggaggcggaggttgcagtgagccgagatcgtgccactgcactctagcctgggtgacagagtgagactccatctcaaaaaaaaaagagaattgagcattgctgggcgtggtgcctcacgcctataatcccagcactttgggaggctgagtcaggcagatcacgagatcaagagttcgagaccagcctggccaacatggtgaaaccctgtctctactaagaatacaaaaattagccaggtgtggtggcgcatgcctgtaatcccagctactcgggaggctgaggcaggagaatcacttgaacctgggaggcagaggttccagttagctgagatcatgccactgcactccagcttgggcgacagagcaagactccgtcttggggaaaaaaataaagaaagaattgagtgtttgataagagtagcattaggtattagtgggaaatgattggatttttcatttaagcattgttgggacaacttgttaaccatttggaaataaagcctaacctttgtcatcttaaaccattgtaaatgaaacctgactataagtagatttacaggaacatatataggagtatatgatgtgcagggagagaagggaagaattaactttgagagctacttatttaatctggttaaaggcaaagactggtttctccttttagaataagtcattgatagcttcctcaaggagttaaaaattcagtgcatcctatagtgaaataaagggatctggaagtgtagaataaaatttatttttgataataaatgatgattgaagccctgaaagttattcaaatgtttttgaaatgattggataaaaagcacattgaatgatctgaaaaatataagaaagtacaggttaagtatttaaaaagggggagaaaaataagaggttgaatattgtcatgacttggtgaatttgaagaaactaattttgaaaagctcataaggataggagaggtgtagtataaaatgacaggtagggattgtaactttggtactactgttaagaattaattccaaaccctagacaataaatcaattacaaaaatgttataataatcaggggagaaaacaaccaggtcctagaccaagttaaaaatggatagagaaaagaaattcaggagattgataacaaaggaagcacagagagtggaatcaaatggctaataaattttctggaatttcttagaaattccatttaaccatatgatatgcttagcagaaattgaataaagattgttaccttcatgttatttttttttctggctcttaaaatgtgcttgggagacagaacaataacttaaaattacagcttagttgaacataaggaatttttagtttttgccttttaatttatggcaaaaatgatagacgcctaattcacactgttaaattttagatggtctgtcttctgctgatcccaactctgattggaatgcaccagcagaagagtggggcaattgggtagacgaagaaagagcttcacttctaaagtcccaggaaccaattcctgatgatcaaaaggtgagtataagagattcctgggtgtttatttgttaatgaaagagacaggctgggcacagtggctcacgcctatgattccagcactttgggaggtactgtgggaggattgcttgagcccaggagttcaaggccagcctgggcaacatagcgagaccccatctctatttataaaaataaaataaagcaactgaaggagaattctgggtcacagaggctgacaccaattgagagcctcagggagacaataatagcatcagaaacagcaaacccaagttttgataggactggaggagagatagtggataatagcaacacgtggtatcaggaatggttttgctagggttggggtgttgtattttaatgatagggagattttggtatagggtcagcagtctttttttctttttttttttttttcggagacagattcttgttgtgctgcccaggctggagtgcagtggcatgatctcagctcactgcaacctctacctcctgtgttcaagcagttttcctacctcagactcctgagtagctgggattactagcccgacactatgcccggctaatttttgtgtatttagtagagatgggatttcaccatgttggcaaagctggtctccaactccagacctcaggtgatccgctcacctcagccccccaaagtgctgggattacaggcgtaagccaccatgcctggccttttttttttttttttttttttttgagatggtgtcctcaaactcctggcctcaagtgaccctcctgcctcagcctctcaaagtgctgggattacatgtgtaagccactgtgtctggcctgcacagtctttattaaaaagccatacattctgatacagctagtcaattatatagcaagtagccatagatgatatggaaatgaattttatttgtaggaactaatgctgggctgtatttgtaatttgccaacccctgttttagcatgtctgtcaatacaaagggaaaggatccggaataaactaaaaagttaaacataggctgggcacagtggcatacacctggtagtcccagctattcagggggctgaggcaggaggattgtttgaacatagcaagaccccatctcttaaaaaagaaaaaaaaaaagaaaaagttaaatgagagggaagatttgactgataaagtaaggtgccagaagaggatcaagaagcctttaacaagtggatggattggtcttttttttttttctttttctttttgagatggagttttgctctgtcactcaggctggagttcagtgatgcaatctcagctcactgcaatctctgcctcctgagttcaagcaattctcgtgcctcagcctcccagtagctgggattacaggcacctgccaccatgcccggctaatttttgtacttttaccatgttggtttcaccatgttggtcaggctggtttcgaactcctgacctcaagtgatccacctgcctcagcctcccaaagtgctgggattacaggcatgagccaccatgccaggcctttttttttttttttttttttttttttttttttttttttttgagatggagtttcgccctgtctcccagactggagtgcagtggcacgatctcagctctctgcaacctccccctcccaggttcaagtgattctccctcctcagcctcctgagtagctgggattacaggcacgcatcaccatgcccagctaatttttgtatttttagtagagacgggtttttgccatgttagccaggctggtctcaaactcctgagctcaagtgatccacccgcctcggcctcccaaagtgctgggattacaggcatgagccaccatgccaggccttttttttttttttttttttttttgagatggagtttccccgtctcccaggctggagtgcagtggcatgatctcggctctctgcaacctccacctcccaggttcaagtgattctccctcctcagcctcctgagtagctgggattacaggcatgcatcaccatgcccagctaatttttgtgtttttagtacagacgagtttttgccatgttagccaggctggtctcaaactcctgacctcaagtgatctgcccaccttggccccccagagtgctgggattacaggcgtgagccactgcccccagccaggattggtctttaaaacaggatataggccgggcacagtggctcccactttgcgaggccaaggtgggtagatcacaaggtcaggagttcaagaccagccgggccaagatggtgaaaccccgtctctgctgaaaatacaaacattagctgggcatggtggcgggcacctgtaatcccatctactcatgaggctgactgaggcaaagaattgcttgaacccgggaggcagaggttacagtgagccaaggttgtgccactgcactccagcctggacaacatagcgagactccatctcaaaaaaaaaaaaaaaaccaccagatataatactaatggtagaaggaggggtaaataaatgtagaggaggacagttaacaggcaatgtgaaagtcaacagtggggaaaggggttttagattggacctacaaaaaggcttcttagaagtacaatatcgtaatatataataccttaatacatagtgatcattcacatgtttgttggacatttaacacaatagaacccatgaatggaataaagactttatcctacatcataggaattctttttctgaatatattcagagattaccttttacatttctaagcaaaagtgagctgtcatcaaaatgttcatcagttggggaatggaaagatgtgatatgtttatacaatggcatattagaagttaaaaatgaactaaagctacattgttagcattatgaatggaaactcaacatgctgaatgatgagcaagttataaaaagatagaatatgtcatttatgtaactttttatatgtggatacaaataaatttatagaaaaattgattggatagacacagaagttgttcacaattttggttaccattaggaaggtactgtgaaaatgggattgggaagcggtataaaggaatttgaaatttatcagtaatgtcctttttatttaaagatttaaaatacatttatcaaaatctcaactctttcatgggagttaaaagttgtagagttgatttcagcatcttcccattaacaaaaatagtattttgccgtgggaaactacatttcttgtatgattggattataatgaagtgataagctgactgaagaaagtccttgtgacctgagtatcattcatggcacgtatctattcatatggcattttaatcattacaagaccttgaaacagcttgtggtgaaaacttctagggatgtttctccacaacttgtagccaaccagcctagactgaaaatctcttagctaagtttgtgccagattttgttttgtttttccatctgcttgtaatttctgtaaactgtctggtagttcgtgagaccaccaaaatcattataatgactatagtgctgagcagagaaatagcggttactagaatcatctcttcctgtaaagatagtctaggaatctaggttgtcatttgtgagaataaacaaaaagcatttttccatagaaagttaaactacagtgcttacttcagcagcacatacactaaaattgaggccaggcgtgatggctcacatttgtaatcccagtactttgggaggccgaggtgggcggatcacccgaggtcgggagtttgagaccagcctggccaacatggtgaaccccgtctctactaaaaatacaaaaaaaaaaaatttagctggatgtggcagtgtgcgcctgtaatcctagctacttgggaggctgaggcacaagactcgcttgaactgggaggcagaggttgcagtgaggcacttcactccagcctgggcaacagagtgagactatctcaaaaaaaaaaaaaaaaaaaaaaaaatagataaggccgggcgcggtggttcacgcctgtaatcccagcactttgggaggccgaggcaagtggatcacctgaggtcaggagtttgagaccagcctgaccaacaaggtgaaaccccatctctactgaaaatagaaaaattagccgggcatggtggtgcacacctataatcctagctacttgggagactgaggcaggggaattgcttgaacctgggaggtggaggttgcagtgagccaagatggcaccattgcactccagccttggcaacagagcaagactccatctcaaaaaaataaatagatagatagataagatacagagaagattggcatggcctctgcatcattatgaatactaacataacagtgctaacttgataggtatatttttgtcctgcagaatgctattttcaatgacatgacctctcaaattcagttttttaaattaaaccttttattttgagataattgtagattcaaatgcagttataagaaataatataggccaggcacggtggctcacgcctgtaatcccagcactttgggagactaaggtaggaggatcacttgagcccatggtgtttgagactagtctgtacaacatagcaagaccctatctctaattaaaaaaaaaaaaaaaagaaaaatcagcctgtagtcccagctcctcaggtggctaaggcaagaggatcaggaggtcaaggctgtgcagtgagccttgattgcaccactgtactccagcctgagcaacagagcgagaccctgtcttgaaaaaaacaaaacaaacaaaacaaggcaggaatgaaacagagtgatcccctgtaccccttttacccagttttccccagtggtaacatgttaaaaaaccataatactgtacagtagcacagtagccatccccaccgctccccacctccacttatacacgggatacattccaagactcccagtggatgactgaaaccacagatagtgtcaaaccctaggtatactatgctttttcctatacataacctctgataaagtttaatttgtaaattagtaaaggattaacaacagtaatcataaaagttataaaatttactgtaataaaagttatgtgaatgtggtctctctcactttctgtgtctttcaaagtactttaatatcagactgaggttgaccgcaggtaactgaaactgcagaaagcaaaactgcaaataagggggaactaccttttcacagctggcgtgtttgcattgatgcaatcaagatacagaacatttatcgtttcaagaatgttttattaatggaattataatatatataaccttttgctatggttcttgtttgttcatttgattgagatggagtcttgctctgttacccaggctggagtgcagtggcatgatctcggctcactgcaacctccacctcccaggttcaagcagttctcccatctcagcctcctgagtagctgggattacaggcgcatgccaccaggcccagctaatttttttatttttagtagagatggggtttcaccatagtggtcaggctgctcttgaactcctgaccttaggggatccacccgccttggcctccaaagtgctgggattgcaggcttcagccactgctcctggccttggtatgttttgttttttgttttttttcactccacataattctctggagattcatccaggttgttgtatgtgtcagtagttgtacctttttactgctgagtgatattccatggtctggatgtacctcagtttctttaaccatttacctattgaaggacatttgtgtcctttccagtttgggactattatgaataaagctgctaaatgtgtaggttttcagaagtctctgtctaaacataagctttcatttctctaggataaatgcccatatgtacaatcgctgggtgttatgatagttgcatattttagtattctaagaaactggtttttctgtatcctcacctaaatttgcagttgtcactgttttttattttagcagttctgataggtgtacagtgataactcattgtggttttaatatgcatttccctaatagcaaatggagttgagctttttcccatggtttctttggcatctgtgcatgttcttgggtgaaatgtctgttcatgtcttttgcatattttctaaggggatttttttttaaacttgagtgttccttgtattatattgtacagatactagttccatggatggaaccatatggcttgcaaatatattcccccattgtgtagcttgttatttcattccttaacagggtcaaataaattttaacgcaaattgcactacatttgaacttcaaaataaagtagaattacctattcagtgagtttttaattttttatttttatttatttatttatttttgagacggagtctcactcttttgcccaggctggagtgcagtggagtgatttcggctcactgcaagctccgcctcctgggttcacgccattctcctgctttagcctcccgagtagctgggactacaggcgcctgccatcacgcccggctaatttttttgtatttttagtagagatggggtttcaccatgttagccaggatggtctcgatctcctgacctcgtgatccgcccgcctcggcctcccaaagtgctgggattacaggcatgaaccaccgtgcccagcctcagtgagtttttaaaacactaaagtttacacagctctctacttaggttgtagtgagtgatggatgacgtagacacactgagagaatgaggttccatgtattttgttattttttaaatatgtagttcttgatccattgtattacttattactagtttttatttagattttgggaaatgaagactgtacctaatgaatgaaattatttcataataattttctaaataatggacacataaccatttggttctctttaatatttttgcttttaacctaaggtctcagatgatgataaagaaaagggagagggagctcttccaactgggaaatccaaaaagaaaaaaaagaaaaagaagaagcaaggtgaagataactctactgcacaggtaaaatgtcagaacaacaagcattcattaagcgcctccggcttaaaatgtgaaaagattatgtacagatgttaaaaatacatagagataaaagacagtatgagacatcatttatttgaaaaatcatagactgttttacatattcaatacattatattgtaataaaaatgttattgctcaaaaaattcgtgttaaaggtgttgctaaactcaaaaataagtaaaattccaaattattcatgcatttttttattatataatggtgaaatgggaaaagagatacagtattttacacatacaaaaattccttttgagtaactggaaggtaacatttagcacacatagaaaaaccatgtgtataacaagtggagtctttcacttgactttgagtttgctggttatttcacttagaagtatcctttcctgcttttttggcatctacccaacagacattttctctttccatcactcatacatttccttttctttctttttctttgctctcctgtctgggggaaaaaaagtaaattataataaaaatgaagtcagagttgaaattttaagctgggcacaatggctcatgcctgtaatcccagcacattggaaggctaaggcaggaggatcacttcagtccaggagcttgagaccagcctgggcaacatggcaaaaccctgtctctacaaaaattagctaggcacggtggcatacgcttgtagccccagctactggggaagctgaggtgagaggatcacttgagcccgggaggcagaacttgcagtgagccaaaaatcacactactgtactccagcctgggtcacagagtaagaacctgtctcaaaaaaaaaaaaaagatattttaatttcagatgtatcagattattagaaacatgcataggtttttttaaagcactaatactgttacattacaacttcttaaaatatttgtattccttactataactatgtaattaattgtttaaatgtaggagacagggaaccgcaatttctagggttagcccacatagtaatttttcctacttattgttctatttgtttatcttttttttttttatttgagacagagtcttgttctgttgcccaggctggagtgcagtagtgcgatctcagctcattgcagcctctgcctcccaggttcaagcgattctcctgcctcagcttcccaagtagctaggattacaggcatgtgccaccacgcctggctaatttttgtattttagtagagacaggctttcgccatgttagccaggctggtctcaagtgatgtggtctcaagtgagcggcccaactcagcctcccaaagtgctgggattacaggcgtgaaccaccacgcccagccttatttatttatttatttttgagacagagtctcactctgtcaccccggctggagtgcagtggcatagtctcacctcactgtaacctgcctctcccaggttcaagtgattctcctgcctgagccttccaagtagctgggattacaggcatgagccaccacacccagctaatttttgcatttttagtagagaggggatttcaccatgttggccaggctggtctcaagtgatctggcctcgagtgatcttcctgcctcagcctcccaaagtgctgggattacaggtgtgagccaccacgcccagccacttactgtttttgaaagaagtttctacatggctttttaaggaaatatgtattcagttattttttattgtgggaagcacaaaccctcataaatgatacaagcttattatcaatacttgcttgctttttcagtagtcaaaatgaatgggcattaaggttgtaacatagctaagatcagtggatatgaacaaactaacactctataataggtatgcttttcttgttagctggagctggtagatgagaaatgttacatctatcctttgttagtaatactacctgaaaaccattttagccaagtttttcttgaatttctttgactttgagtatttactaataatgatttagtggattgtggattagtggagctccttttaaaataaattttgtaggatagatgtattctgaaatgtttaacgtattggcaaaggtcattaacatgtgactgtttctttggcattctgattatccttttaaaaatgttcactgtgtttttaaaaatataatgaataagtattctaggtttagagtcagatctatattctgaatcttgttctgtcattttttttttttaccttgcacaagttacataattgcataggttgttttgagaatttgatatccatgaagttctatgctgagtacatagcacatatatcctattaataaaaggttatggctgggcgcggtggctcacgcctataatcccagcactttgggaggccacggcgggtggatcacctgaggtcgggagttcgagaccaacctgaccaacatggagaaaccctgtctctactaaaaatacagcattaaccgggcatggttgcatgcacctgtaatcccagctactcgggaggctgaggtaggagaatcacttgaacccgggaggcggaggttgcggtgagccaagatcatgccattgcactccagcctgggcaacaagagtgaaactccatcttaaaagaaagaaaaaaaaagttaggccgggtgcggtggctcatgcctgtaatcccagcacctgtgaggccgaggcgggtggatcacaaggtcaggagtttgagaccatcctggccaacatggtgaaaccccgtctctactgaaaatacaaaaattagccgcacgtggtagctggcgcctgtagtcccagctacttgtgaagttgaggcaggagaatcgcaggttgcagtgagccaagattgtgccactacactccagcctggacaacagagtgagactgtctcaaaaaaaaaaattatattgttttttctctttttgttttgttttgtttgtttgttttttgagacattccactctgtggtcaggctggaatgcagtggctccatcacagctcactgcagcctcaacctcctgggctgaagggatcctcctgcttcagcctcccaagtaactaggactacagtttttttatttttttgtagagacagagtttccctatgttacccaggctatcccaaactcctgggctcaaacagtcctcctgccttggctcccaaagtgctgggattacagatgcaagctaccgcaccaaacccaaagtcctttttggtgttcgtgtgtggctgatggggtctttcactgttgagttcaacttgggatggaaataaattgatgtcttctgactttgtaagattgcaaaactttgaaaaactttgtaagattacagacttcacccacatacttccaaagctacctgctcagcctaaatatatagaaaattttgactatctaaacccactactatactgaataactatcataaaatagaacatcagtgtcagaagaacattaagatcatcttagccatttgttaaaaagaacggccattttatatggatgcatttgccaaagaaaaatacagtaatccttctatttaatatattctagttcatgtttactttacatataatttactaagcatataatgtgctctagaattattttgctgaaacttcataaaagtttgaaagtctaagaatggaaatcttgctgccctgatgtcctgtggtgtttggcatgtgccctcctgtctcctgactaatcagagtggcatgaggcccacgccacccaaacctttcactttccaaagagctagccatcctccaccctgtaccatggtgtcctagcctgtctgcgtttgttagtggtgatattctttatgtataataaatttttatccccccccccccaaaaatggaaatcttaaagcttatgtgagtttttagaaattattagggcaaattttactttacagttgaggaaacaggcttagggaaactaagtgacttgtccctgagattgtttgtttgtttgtttgtttttgagacaaggtctcactctgtcacccaggctggagtgcagtggcacgatcttggctcactgcaaccttcatctcccaggttcaagcaactatcatgtatcagcctcccaagtagctgggattacagatgtgtaccaccattaccagataatttttgtatttttagtagaaacagggtttcaccatgttggccagactggtcttgaactcctgacctcaagtgatccacccacctcagcctcccaaagtgctgggattacaggcatgagccacagcacccggcctaatttttgtatttttagtagagatagggtttcaccatgttgcccaggctggagtgcagtggcgagatctgcaacctccgccttccaggttcaagtaattgtcatgcctcagcctcccaaatagctgggattacaggcgtgcgccaccacacccagctaatttttgtatttttattacagacagcgtttcaccatgttggccaggctggtctcgaactcctgacctcaggtgatctgcctgcctcagcctcccaaagtgctgggattacaggcgtgagccactgccaaatctatccctgagattttgtagctagactgtggcatggccaaaattggaattttctgtctataccctttctactatgtaagcttaatttatctagaaaattaacttatgtataaacattttattccttgaagttgttaagtgaagtgttttttgtgggtttttttttgtttttgtttttgttttttttgtttttttttgtgagacagagttttcctctgttgcccaggctggagtgcaatggtgcgatctcggctcactgcaaccttcacctcccaggctcaagcaattctcatacctcctcctgagtagctgggattaaaggcatgcaccaccatgcctggctaatttttgtagttttgtagttttgggttttttttttttctttgagacagaatcacccagcctggagtacagtggtgtgatcacagtctactgcagcctccatctctcaggctcaagtagtcctccctgctcagcctcctgagtaactgggactacatgtatacaccaccacatgtgactaatttttgtatttttgtagagacagggtttcaccatgttgcccaggctggtctcaaattcctgagctcaagcaattcacccacctccgcctcccagagtgctgggattacagccatacaccaccatagattttaattaatgaagaatgaatgctttatataatctaataggttatttttctctataggacacagaagaattagaaaaagagattagagaagaccttccagtgaatacctctaaaacccgtccaaaacaggaaaaagctttttccttgaagaccataagcactagtgatccagccgaagtactcgtcaaaaatagccaggtaatttttaagaataataaagttgccgggcgcagtggcttacgcctgtaatcccagcactttgagaggccaaggtgggcaggtcatgaggtcaggagttcaagagcagcctggccaacatagtgaaaccccgtctctactaaaaatacaaaaattagccgggcacggtgatgggagcctgtaaccccagctacttaggaggctgaggcaggagaatcgcttgaacctgagaggcggagggtgcagtgagccgagatcactccactgcactccggcctaggcaagagagcaagacactgtctcaaaaaaaaaaaaaaaagaataataaagttttgttgactcaagtattttatcataaataatgttttaagcactgtgctaagcatttaaaatataatgactaatttagtcttcaaaacaatcccgagagaaaggtgagacgcattttataaatgaagctagagaagttgaataacttgcccagagtcatataactatcagtagtgaaatcaagaaccacactgtactgtattttctcctgctaaatatctaggcatacaagggatagacagcttagacatagagaaaatatgagtggtttcattttcccccaatatatgtacataatatgactatggttcagcctcccaaaatggaacatttgtttaaaacttggttataggctcttgaatgatgtgccttctatggaaagtatctgtatggcagaagggaccattttacaaaaggcctaggttggtgacacaaaatctgatttctaattgggtaaattaattacatcatataaattcagggctgggtgtggtggctcacgcctgtaatcccagcactttgggaggccaaggtgggtggatcacaaggtcaggagttcgagaccagcctggccaagatggtgaaaccctgtctctactaaaaatacaaaaattggccaggtgtggtggcaggcacctgtaatcccagctacccaagaggctgaggcaggagaatcacttgaacccaggaggcagaggttgcagtgagccaagatcacgccactgcactccagcctgggcaacaaagtgagactccatctcataaataagcaaccaggtgcagtggctcagacctgtaatcccaacactttgggaggccaaggcaggaggatcacttgagtccaggagtttgagaccagcctgggcaacatggctagactcagtatttacaaaaagcacaaaaattagctgggtgtagtggtgtgtgcttgtagtcccagctactcgggagactgagtgggaagatcacttgagcccaggaggtcgaggctgcagtgagctgtaattgcgccactgcactccagcctgggcgacaaagtgagactttgtgaagaagaatatatatatatttatttatttatttatgtgtgtgtgtataataaatagcaaagggtctatttgactttttttttttttttttgagacaagagtcttgctctattgcccaggctggagtgcagtgacgcaatccgcaatctcggctcgctgcaacctctacctcctgggttcaggcgattttcctgcctcagcctcccaagtagctgggattacaggtgcacgccaccacccctggctaatttttatatttttagtagagatggggtttcaccttgttggccaggctagtctcgaactcctgacctcaagtgatccgcctgcctcagcctcccaaagtactgggattacaggcacgagccaccacgcccggcctctgtttgatatttttatattaaatcattttcagaagccatcttatgaagaagatttgatccgttctgtgacttaatgtagataagtgagagaacaaaggggaaaaggagattaaaaataagtaacaataaaacttctggatatgaaataaatacagggaacactaagaaaggtaaagaaactaggcaacataaatacaacctcagggccagccatggtggctcacgcctgtaatcccagcactttgggaggttgagatgggtagatcacttgagctcaggagttcaagaccagctgggcagaatgatgaaacccccgtctctaccaaaaatacaaaaaagtaactggatgtggtggtgtgcacctgtggtcccaggtacttgggggactgaggtgggaggatcatgtgagcccaggaggcagaggttgcagtgaatgaagatcacaccactacactccagcctgggtgacagagtgagaccctgtcacacacacacacacaaatacaacttcagatacctggaataggaagaaggaatcctagtaattacttgggctcacaccatttcctcttgtatccttatcccattttgctttctcgaatctatgggccctggaagaataggggcaagagaagcattacttacccttctttctatgttcaggataatgatcacagatagagctaataggtgaaatgatctactcatctctcacaacccgaaggcactccaaattactgacgttcttatcattaccaggtcctgatcatttattaatggatatgcttcagtgaggcaaatcagttagtttacctcctttctgcttccaggctgtagagaagtaaggctcaagaatctaggctctgccttaagcattccaatttcactaccagactggataaaacactgaaaatttgtacctgagtgttaccagttgcttgagtcagtaggactggtaaccacagtgtgcttgtaggaaacagaagctgttgctgctgctatttgagaaattcttacctgttgggaaggagattaggagttgtcatctactggtagttcagaagttagctattttccttctgtttttcacaaaaatttttgaagcgttctgagttggtggaaatggacaacaaccaatgaatcactaacaagtataaaatcagccagtctcagtggttcacgcctataatcccagctactcaggaggttgaagtgggaggattgcttgagcccaggaggtcaaggctgcagtgagctgttttgtgcctctgcactctaggctaggccatagagcgatactctgtctcaaaaaagaaaagcataaaatcatcttatttatatgaaacttaagaatataaaagttaggccgggcgtggttgctcatgcctgtaatcccagcactttgggaggctgaggcaggcggatcacgaagtcaagagatcgagaccatcctggctaacacagtgaaaccttgtctctactaaaaacacaaaaaaaatagctgggcgtggtggcacacgcctgtagtcccagctactcaggaggctgaggcaggagaatcgtttgaacccgggaggcggaggttgcagtgagccaagattgtgccactgcactccatcctgggcaacagagcgagactccacctcaaaaaaaagttaatgaaaaattattcatttctatttgaaattcagtagacattttataatttcataccttcatttttatctcaacatatattcataaatgttgtaggtgatgattgatttggctgtatcactagagggcaggtatgagttacattgtttatctggaaaccatattagtattgaattgctgctaaaccacctcttggtattactgtgatatttaaactttatttgaaaatttcaccaaaaaacctgagatgattttttcctaaaatagcctatcaagactcttccacctgctacttctaccgagccatctgtaatcttatcaaaaagtgattctgacaagagctcttcccaagtgccgccaatactacaagagacagataaatccaagtcaaataccaagcaaaatagtgtgcctccttcacagagtaagtaatcctcattttttgttcctttgtactgtttacatttttcatgtgttaaggttctgatcttaaaagtctaatggaggccaggcgcagtggctcacgcctgtaatcccagcactttgggaggccgaggcgggcagatcacgaggtcaggacatcaagaccatcctggctaacatggtgaaaccccgtctctactaaaaatacaaaaaattagccaggtgtggcggcgggtgcctgtagtcccagctactcgggaggctgaggcaggagaatggcgtgaacccgggaggcagagcttgcagtgagccaaaatcgtgccactgcactccagcctgggcaacagagcgagactccgtctcaaaaaaaaaaacgtctaatggattaataagagtagccctttcttcctttgaaaatgctaaattctgccgggtgcggtggctcacgcctgtaatcccagcactttgagaggctgaggcgggcggatcactaggtcaggagatcgagaccatcctggctaacatggtgaaaccccgtctctactaaaaatacaacaaattagccgggcgtggtggcaggcacctgtagtcccagctactcgggaggctgaggcaggagaatggcgtgaacccgggaggcggagcttgcagtgagccgagatcatgccactgcactccaacctgggcgacagagcaagactctgtctcaaaaaaaaaagagaaaatgctaaattttttggacgtttgtctacttaagttgtgaaggccaagttgttaaaataactaaaggaggctgggtgccgtgcctcacacctgtaatccgagcactttgggaggctgaggcgggtggatcacttgaagtcagaagttcaagaccagcgtggccaacatggcgaaaccccgtctctactaaaaatacaaaaattagctgggtgtgctggccgaacatctgtaatcgcagctactcgggaggctgaggcaggagaatcgcttgaacgcgggaggcggaggttgtagtgagccaagattgcgccattgcactccagcctgggtgacagagcaagactcaataaataaatgatcaatctatctatctatctctgaaggagagaatacattgctgagaacagagagggagaactttcatgcctgcctgcttgtctatgtggtccctctccctttttctctgcacatgttcttgaggctacaaattattctatgctttttttcctcctttactctcttcagctacctttagtatccattttacccatttttctcttttattagttaggttgagccatattaaataacagtttttttgggtcaaaactggttgaatatcagcagttccatatagttcaacctaataataccattgaaaggaaaggagggaagaagacatagaataacttaaaatatataacgagggcttgaaaacttaaacataaaatttgagtattttaaaacattgtttcatagttactacttttatattattgagacgtaacagtatttaccatcctcctaatttttttcttcgttttcccccttttcttttttagccaagtctgaaactagctgggaatctcccaaacaaataaaaaagaagaaaaaagccagacgagaaacgtgaaattttttttcctgaattggacatgtgtttgcaaacacttgtcttgaagattatgctgtttatgcaataatttgtgaacatgtacagagttttatataaatttaaaccaatttttaaaacaaaactgcggacaccaccataaaaatggaatcaaaagaaagttaatttatgaaattaagaggtcagcagaatatactcagtgatggaagacacttgggaaagtctttttaatagaacaagaacgatcttaatttaagaatattatcctggtttaacaacagtgccctgtttacaacagattgtgccctatctcatctgcagccgaggaataaaggattctgattagaaagagggttgcctacagattagtaagcaattccttggatcttatgcacagaacttgtaccatttgaatctgttttatgcttaaatcaaagtgctttgatcaaatgcataacctgccatatctttacatatttgttggtagcaatttgtattaaagaaatcacaagtgcaaataaaaagtcatttatcatttgtttaactaaactgtcatggtttagtttacaatttttaaaaagttcttaaaatactgaaaatgcagttgacacttgtgtatggcttatgaagttatttttgatagtcttacattacttgaattgttcaaagtacagtatattttaaattaagaaaagtgaactatatgtatttgttttatacatttaaggcttagactcataaataatgctattgtttatgatttgaaaactttcaggcaaaatccaatttacatttttcccttccctagcaattacttttttccagcttcaactcttcttagttactaatactttgttgactttaaaaatgaaatcattcacaaacttttggtatatgatggagaatgaaaaactagagtcagacagctttaattgacattgtcaacacctccagttatcaggaatacatttttttactgccttaacctgtagtgcgtagaatatgcatcaatttcttgaaggagattcatgtttttataagaattttcatgtaattattgcaattgtggtcaaataaggaacgtttcctgcttgaaattatattgatttaaatgatgtgtgagatgtttcaccattttcaggcactgtgtaattctattgtaataaactggcaggtatctttgtaactataaatagtgcatgctcagccatgtacactgtaaatagcctttaccaaacgtgtttgacaaggaccataattaacatcacttagtgaattgtgataaagaaaaaaaagccatgatttattcgatgtgattggcttgtttttatgtggcgccaagaacgaacctgtttaacagctgtaaccaatggtactgatctatccatccaatgttgtcattatatttgactgtggttcaacagtattgcgttgtcagactaggaaagctaaacgaacaaaatggttttagttttgctgaagactggccttattaatggacagctttcctaacaagagattattaacttttatcaggtgttaacatctgtttcaggaacatggcagtatgtttacatgtcagaagttttgtttaattctatggtatttctaaattgacttgtttaaataaattcagcaaatggatagcattgttttttatttgcttcaatatgggggtagataatagctaaagagccaaggatgaatttcttcaaatgactttattctgttagctttacataggtgttggaggattcctaaggtgtcagcattttgtaaaggtaccacaaaggagaagttgatagggaatctaattttagaatgtgccaaatggtctgtgctcaacaatataattgaactctctcaactctacctcaccatttctttatctcaaaattctgttggctttgtcaaacgttggattttatttctgcagcctagtatctccccattctaccacctatgccagatgttaaagacagcagatgttttgaggagaatggcattgtggagatgcagagatgcgttgctaagttgaggtggatccagtatagagatacctctatttcttctttatggctcaagagctaggacttggattttgttttaagagatggcagctggccgggtgcagtggctcacgtctgtaatcccagcactttgggaggccgaggcaggtggatcacgaggtcaggagttcaagaccagcctggccaagagggtgaaaccccatctttactaaaaatacaaaaaaaaaaattagctgggtgtggtggtgggctcctgtaatcccagctactcaggaggctaaggcagagaatcatttgaacccaggagacggagtttgcaaagccaagatcgtgccactgcactccagcctgggcaacagaaggagactccgtctcaaaaaaaaaaaaaagatggcagctatataaatgataaaattaattacattctctttcacatgcatgaggtgcaaactctgtcacaaagtattttaattaccttttaccttgtttcatagatctttatgtgacataaaaacagtttctggcacggtggctcacgcctgtaatcctagcactttgggaggctgaggcaggtggatcacctgaggtcaggagtttgagaccagcctggccaatatggtgaaaccccatctctacaaaatttgcaaaaagtagatgggtgtggtagtgggcgcctgtaatcccagctactcaggaggttgaggcagagaatcgcttgaacccggggggtggaggttgcagtgagctgagatcgcaccactgcactccagcatgaaagagcgagactcaatctcaaaaaaaaaaaagtttctggcacctgaacaggaactggtttccatcatcaactcagaaagcactaaaatctaggtggtgattcagggaggagcaggggaagacagcctcctatggtggcatgaataagatgcttccagaactagtagggaaataactaacctcttcaggctttatcaggcctggaggggaaccttgctcatgttagcaagaaaggtatcctagagaagccactcaaaaggctccctaatccagcctgtctccacatacatactgaaaattcttccctactctgaggcagggtgtagtggtttaggggtttctccagactggaatcctacctatctgtaccgacaattgagcaaacaacagttgagagagtccaaaaaaaaaagtattaaaatgtgattgatgtaatttaccatgtttactttatgcatgcattttattggggaggggaggtcagaataattcacccaaatctagtggtcttatttcataggctaatctggtttatatttgcattaaagatactggagggcaatatttacagagtttagtttttcttaattaaaaacagtcctctattaatatagtgtgaaatatctttcaaaatttagagtttaggtttaagatgtctactagatatctttaagattttcctgtaaactcactgcacaaactggaattactttccaaaagacttagggaatgcaaatatgttattcataagatgcattgagtattgtaaataaaacaaaccatttttgatttgtttaaattgctcgttacagttctcttgtggggagggactttgtcagtcattttgcatcttaagctagactaaactttttgttgttgttttcctaaaaccataggtgcaagctttgccgctgggaagtcatattgaattaagcacttttgaaaatgtcactgtttgtgacacacaatgttctctacagaaaacttcttctatcttatgtcattttagcagtagatgtaactgcctgccaccaggtgcaatatgtcatttgcatcagccttttcagttaaggaaattaaaacttggcatgcattagttcatatgtatgaggttggctgtgtccccaaacagcaattgcttgtacaagatagaagtttgcttctcagctgggcatggtggctcatgcctgtaatccaagctctttgggaggccaacgcgggaggattgtttgagcccaggagtttgaaaccatcctgagcaatagagagacccccatctcgacaaaaaaaaaaaaaaaaaaaattagaaacaaaaaaaagattgtttctctttcatattaaagtttgggaaggcaatccagagcccatatgacattatgcagggtcagggatccgggttctttctatattgttcctccccattctcaacctgtggctttttttttttttcttttaatgagatagggtctcactctgttgcccaggctggagtgcagtggcacacttctggctcacttcagcctggaactcccgggctcgagctatattctcccactttagcctcagcctccagagtacctgggactacaggtacacaccaccatgcctggctaaatttttttttttttttttggtagagatgaggtcattgctatgttgcccaggctggccttgaagtccagggcttaagtgatcctcctgccttggcctcccaaagtgctggtgttacaggtgtgagccaccacacctggccaacatgtggctttcagttcttacttgaagacagctgctctagctagaaacttcctatcggcatttgagccagctggtagagggcattacctcccccacccccaagaacacttcttggaagttacacacaatacataaacttcaatttcaaacagttgcttggtcccactagccatgaagctggatgggacgtaatattctatctgggttgtcatgggccaaattaacattttgagattctgttaggaagatgagaattggataatgggcacctctaacagtgtctgtcagagttgacatacattgtgtatctcctgcaccaaagcatttttgagatcaagtgttcttccagctgagcagaaatttggaaggctattcagtgctgcttagtgtagcagctaataatgttccaacttctatatgatagtttgctttttgttttttgtttttttctagagacagagtctcgttgcccaggctggtctccaattcctgggttcaagcaatcctcctgactcagcctcctaaatgctgggattacaggcatgaaccactgtgcccagtctatatataatagattttagaagaaatttctgccactcagtgactgctttaaattctagagacagaggctgagagaaacttagtagcctgcctgcgcatactgcaagtacagactatataacaagttgaaagagaatc

SEQ ID NO: 367 - DNA, 4331 bp, Homo sapiens
cgtgacccacggtcgtccccgcgcgcggcgtggatcgcggcccaagccgccattgttccgccgagggaggacagcggggcctggcgctggcgccgagacgccgcttagcggccgccactggagacactccctcccgcctcccgggtctcctggcggcggcggagtgaggctgacagcggggaacctgggagacccctccgccctccccgcggtggcagcggccgatccccggctccggcgcgagggacggccgcgatgcgctcggcctgaggttacccggcccggcccttcctcgcttccctcgactattccactgcgtctccgcgccccggcgtcatcctgcgagtccctctgacgggagggaagatggctgcacggagctggcaggacgagctggcccagcaggccgaggagggctcggcccggctgcgggaaatgctctcggtcggcctaggctttctgcgcaccgagctgggcctcgacctggggctggagccgaaacggtaccccggctgggtgatcctggtgggcactggcgcgctcgggctgctgctgctgtttctgctgggctacggctgggccgcggcttgcgccggcgcccgcaaaaagcggaggagcccgccccgcaagcgggaggaggcggcggccgtgccggccgcggcccccgacgacctggccttgctgaagaatctccggagcgaggaacagaagaagaagaaccggaagaaactgtccgagaagcccaaaccaaatgggcggactgttgaagtggctgagggtgaagctgttcgaacacctcaaagtgtaacagcaaagcagccaccagagattgacaagaaaaatgaaaagtcaaagaaaaataagaagaaatcaaagtcagatgctaaagcagtgcaaaacagttcacgccatgatggaaaggaagttgatgaaggagcctgggaaactaaaattagtcacagagagaaacgacagcagcgtaaacgtgataaggtgctgactgattctggttcattggattcaactatccctgggatagaaaataccatcacagttaccaccgagcaacttacaaccgcatcatttcctgttggttccaagaagaataaaggtgattctcatctaaatgttcaagttagcaactttaaatctggaaaaggagattctacacttcaggtttcttcaggattgaatgaaaacctcactgtcaatggaggaggctggaatgaaaagtctgtaaaactctcctcacagatcagtgcaggtgaggagaagtggaactccgtttcacctgcttctgcaggaaagaggaaaactgagccatctgcctggagtcaagacactggagatgctaatacaaatggaaaagactggggaaggagttggagtgaccgttcaatattttctggcattgggtctactgctgagccagtttctcagtctaccacttctgattatcagtgggatgttagccgtaatcaaccctatatcgatgatgaatggtctgggttaaatggtctgtcttctgctgatcccaactctgattggaatgcaccagcagaagagtggggcaattgggtagacgaagaaagagcttcacttctaaagtcccaggaaccaattcctgatgatcaaaaggtctcagatgatgataaagaaaagggagagggagctcttccaactgggaaatccaaaaagaaaaaaaagaaaaagaagaagcaaggtgaagataactctactgcacaggacacagaagaattagaaaaagagattagagaagaccttccagtgaatacctctaaaacccgtccaaaacaggaaaaagctttttccttgaagaccataagcactagtgatccagccgaagtactcgtcaaaaatagccagcctatcaagactcttccacctgctacttctaccgagccatctgtaatcttatcaaaaagtgattctgacaagagctcttcccaagtgccgccaatactacaagagacagataaatccaagtcaaataccaagcaaaatagtgtgcctccttcacagaccaagtctgaaactagctgggaatctcccaaacaaataaaaaagaagaaaaaagccagacgagaaacgtgaaattttttttcctgaattggacatgtgtttgcaaacacttgtcttgaagattatgctgtttatgcaataatttgtgaacatgtacagagttttatataaatttaaaccaatttttaaaacaaaactgcggacaccaccataaaaatggaatcaaaagaaagttaatttatgaaattaagaggtcagcagaatatactcagtgatggaagacacttgggaaagtctttttaatagaacaagaacgatcttaatttaagaatattatcctggtttaacaacagtgccctgtttacaacagattgtgccctatctcatctgcagccgaggaataaaggattctgattagaaagagggttgcctacagattagtaagcaattccttggatcttatgcacagaacttgtaccatttgaatctgttttatgcttaaatcaaagtgctttgatcaaatgcataacctgccatatctttacatatttgttggtagcaatttgtattaaagaaatcacaagtgcaaataaaaagtcatttatcatttgtttaactaaactgtcatggtttagtttacaatttttaaaaagttcttaaaatactgaaaatgcagttgacacttgtgtatggcttatgaagttatttttgatagtcttacattacttgaattgttcaaagtacagtatattttaaattaagaaaagtgaactatatgtatttgttttatacatttaaggcttagactcataaataatgctattgtttatgatttgaaaactttcaggcaaaatccaatttacatttttcccttccctagcaattacttttttccagcttcaactcttcttagttactaatactttgttgactttaaaaatgaaatcattcacaaacttttggtatatgatggagaatgaatacatttttttactgccttaacctgtagtgcgtagaatatgcatcaatttcttgaaggagattcatgtttttataagaattttcatgtaattattgcaattgtggtcaaataaggaacgtttcctgcttgaaattatattgatttaaatgatgtgtgagatgtttcaccattttcaggcactgtgtaattctattgtaataaactggcaggtatctttgtaactataaatagtgcatgctcagccatgtacactgtaaatagcctttaccaaacgtgtttgacaaggaccataattaacatcacttagtgaattgtgataaagaaaaaaaagccatgatttattcgatgtgattggcttgtttttatgtggcgccaagaacgaacctgtttaacagctgtaaccaatggtactgatctatccatccaatgttgtcattatatttgactgtggttcaacagtattgcgttgtcagactaggaaagctaaacgaacaaaatggttttagttttgctgaagactggccttattaatggacagctttcctaacaagagattattaacttttatcaggtgttaacatctgtttcaggaacatggcagtatgtttacatgtcagaagttttgtttaattctatggtatttctaaattgacttgtttaaataaattcagcaaatggatagcattgttttttatttgcttcaatatgggggtagataatagctaaagagccaaggatgaatttcttcaaatgactttattctgttagctttacataggtgttggaggattcctaaggtgtcagcattttgtaaaggtaccacaaaggagaagttgatagggaatctaattttagaatgtgccaaatggtctgtgctcaacaatataattgaactctctcaactctacctcaccatttctttatctcaaaattctgttggctttgtcaaacgttggattttatttctgcagcctagtatctccccattctaccacctatgccagatgttaaagacagcagatgttttgaggagaatggcattgtggagatgcagagatgcgttgctaagttgaggtggatccagtatagagatacctctatttcttctttatggctcaagagctaggacttggattttgttttaagagcatgaaccactgtgcccagtctatatataatagattttagaagaaatttctgccactcagtgactgctttaaattctagagacagaggctgagagaaacttagtagcctgcctgcgcatactgcaagtacagactatataacaagttgaaagagaatc

SEQ ID NO: 368 - protein, 576 aa, Homo sapiens
MAARSWQDELAQQAEEGSARLREMLSVGLGFLRTELGLDLGLEPKRYPGWVILVGTGALGLLLLFLLGYGWAAACAGARKKRRSPPRKREEAAAVPAAAPDDLALLKNLRSEEQKKKNRKKLSEKPKPNGRTVEVAEGEAVRTPQSVTAKQPPEIDKKNEKSKKNKKKSKSDAKAVQNSSRHDGKEVDEGAWETKISHREKRQQRKRDKVLTDSGSLDSTIPGIENTITVTTEQLTTASFPVGSKKNKGDSHLNVQVSNFKSGKGDSTLQVSSQENLTVNGGGWNEKSVKLSSQISAGEEKWNSVSPASAGKRKTEPSAWSQDTGDANTNGKDWGRSWSDRSIFSGIGSTAEPVSQSTTSDYQWDVSRNQPYIDDEWSQGLSSADPNSDWNAPAEEWGNWVDEERASLLKSQEPIPDDQKVSDDDKEKGEGALPTGKSKKKKKKKKKQGEDNSTAQDTEELEKEIREDLPVNTSKWKQEKAFSLKTISTSDPAEVLVKNSQPIKTLPPATSTEPSVILSKSDSDKSSSQVPPILQETDKSKSNTKQNSVPPSQTKSETSWESPKQIKKKKKARRET

SEQ ID NO: 369 - DNA, 3946 bp, Homo sapiens
cgtgacccacggtcgtccccgcgcgcggcgtggatcgcggcccaagccgccattgttccgccgagggaggacagcggggcctggcgctggcgccgagacgccgcttagcggccgccactggagacactccctcccgcctcccgggtctcctggcggcggcggagtgaggctgacagcggggaacctgggagacccctccgccctccccgcggtggcagcggccgatccccggctccggcgcgagggacggccgcgatgcgctcggcctgaggttacccggcccggcccttcctcgcttccctcgactattccactgcgtctccgcgccccggcgtcatcctgcgagtccctctgacgggagggaagatggctgcacggagctggcaggacgagctggcccagcaggccgaggagggctcggcccggctgcgggaaatgctctcggtcggcctaggctttctgcgcaccgagctgggcctcgacctggggctggagccgaaacggtaccccggctgggtgatcctgaatctccggagcgaggaacagaagaagaagaaccggaagaaactgtccgagaagcccaaaccaaatgggcggactgttgaagtggctgagggtgaagctgttcgaacacctcaaagtgtaacagcaaagcagccaccagagattgacaagaaaaatgaaaagtcaaagaaaaataagaagaaatcaaagtcagatgctaaagcagtgcaaaacagttcacgccatgatggaaaggaagttgatgaaggagcctgggaaactaaaattagtcacagagagaaacgacagcagcgtaaacgtgataaggtgctgactgattctggttcattggattcaactatccctgggatagaaaataccatcacagttaccaccgagcaacttacaaccgcatcatttcctgttggttccaagaagaataaagtttcttcaggattgaatgaaaacctcactgtcaatggaggaggctggaatgaaaagtctgtaaaactctcctcacagatcagtgcaggtgaggagaagtggaactccgtttcacctgcttctgcaggaaagaggaaaactgagccatctgcctggagtcaagacactggagatgctaatacaaatggaaaagactggggaaggagttggagtgaccgttcaatattttctggcattgggtctactgctgagccagtttctcagtctaccacttctgattatcagtgggatgttagccgtaatcaaccctatatcgatgatgaatggtctgggttaaatggtctgtcttctgctgatcccaactctgattggaatgcaccagcagaagagtggggcaattgggtagacgaagaaagagcttcacttctaaagtcccaggaaccaattcctgatgatcaaaaggacacagaagaattagaaaaagagattagagaagaccttccagtgaatacctctaaaacccgtccaaaacaggaaaaagctttttccttgaagaccataagcactagtgatccagccgaagtactcgtcaaaaatagccagcctatcaagactcttccacctgctacttctaccgagccatctgtaatcttatcaaaaagtgattctgacaagagctcttcccaagtgccgccaatactacaagagacagataaatccaagtcaaataccaagcaaaatagtgtgcctccttcacagaccaagtctgaaactagctgggaatctcccaaacaaataaaaaagaagaaaaaagccagacgagaaacgtgaaattttttttcctgaattggacatgtgtttgcaaacacttgtcttgaagattatgctgtttatgcaataatttgtgaacatgtacagagttttatataaatttaaaccaatttttaaaacaaaactgcggacaccaccataaaaatggaatcaaaagaaagttaatttatgaaattaagaggtcagcagaatatactcagtgatggaagacacttgggaaagtctttttaatagaacaagaacgatcttaatttaagaatattatcctggtttaacaacagtgccctgtttacaacagattgtgccctatctcatctgcagccgaggaataaaggattctgattagaaagagggttgcctacagattagtaagcaattccttggatcttatgcacagaacttgtaccatttgaatctgttttatgcttaaatcaaagtgctttgatcaaatgcataacctgccatatctttacatatttgttggtagcaatttgtattaaagaaatcacaagtgcaaataaaaagtcatttatcatttgtttaactaaactgtcatggtttagtttacaatttttaaaaagttcttaaaatactgaaaatgcagttgacacttgtgtatggcttatgaagttatttttgatagtcttacattacttgaattgttcaaagtacagtatattttaaattaagaaaagtgaactatatgtatttgttttatacatttaaggcttagactcataaataatgctattgtttatgatttgaaaactttcaggcaaaatccaatttacatttttcccttccctagcaattacttttttccagcttcaactcttcttagttactaatactttgttgactttaaaaatgaaatcattcacaaacttttggtatatgatggagaatgaaaaactagagtcagacagctttaattgacattgtcaacacctccagttatcaggaatacatttttttactgccttaacctgtagtgcgtagaatatgcatcaatttcttgaaggagattcatgtttttataagaattttcatgtaattattgcaattgtggtcaaataaggaacgtttcctgcttgaaattatattgatttaaatgatgtgtgagatgtttcaccattttcaggcactgtgtaattctattgtaataaactggcaggtatctttgtaactataaatagtgcatgctcagccatgtacactgtaaatagcctttaccaaacgtgtttgacaaggaccataattaacatcacttagtgaattgtgataaagaaaaaaaagccatgatttattcgatgtgattggcttgtttttatgtggcgccaagaacgaacctgtttaacagctgtaaccaatggtactgatctatccatccaatgttgtcattatatttgactgtggttcaacagtattgcgttgtcagactaggaaagctaaacgaacaaaatggttttagttttgctgaagactggccttattaatggacagctttcctaacaagagattattaacttttatcaggtgttaacatctgtttcaggaacatggcagtatgtttacatgtcagaagttttgtttaattctatggtatttctaaattgacttgtttaaataaattcagcaaatggatagcattgttttttatttgcttcaatatgggggtagataatagctaaagagccaaggatgaatttcttcaaatgactttattctgttagctttacataggtgttggaggattcctaaggtgtcagcattttgtaaaggtaccacaaaggagaagttgatagggaatctaattttagaatgtgccaaatggtctgtgctcaacaatataattgaactctctcaactctacctcaccatttctttatctcaaaattctgttggctttgtcaaacgttggattttatttctgcagcctagtatctccccattctaccacctatgccagatgttaaagacagcagatgttttgaggagaatggcattgtggagatgcagagatgcgttgctaagttgaggtggatccagtatagagatacctctatttcttctttatggctcaagagctaggacttggattttgttttaagagatggcagctggccgggtgcagtggctcacgtctgtaatcccagcactttgggag

SEQ ID NO: 370 - protein, 141 aa, Homo sapiens
QRGTWETPPPSPRWQRPIPGSGARDGRDALGLRLPGPALPRFPRLFHCVSAPRRHPDSDGREDGCTELAGRAGPAGRGGLGPAAGNALGRPRLSAHRAGPRPGAGAETVPRLGDPESPERGTEEEEPEETVREAQTKWADC

SEQ ID NO: 371 - DNA, 5643 bp, Mus musculus
  misc_feature (1)...(5643): n = A,T,C or G
atgggcaaggagccgagcagcgctctgagtggccgggcagtaacagcgtccactgccagggtcctgcctgttccgttaactgcccccgcccccgacccgatcggccttaaaaagctccaacttgcaaccaaatccccagtcggagcgctgcagaaaaggaccacgatgggcttgggtgactacagccactgcagacagaggatgtcccggggactctacggagtctctggaagggctgcgctatggtccccagtcttccacccggtgcaccgcatgccttgcggcacctggcgcatcggcatcgaagtgccagagcacgtccgggcgtccagcccggtgctggagcacctccgcaggcagctggagcgcgcctttcagcgggcggcggcacgcgggcgcgccagacgcgcgcgggaggcggtggcggcggtggcggcggccgcagcggcagcacgggaggaaaggagccggacgcgcatggagtgcgccctggcccggctgcgcgcggagctggtgagcgcgggctgtgcggcggggttcgcgctctggagtccgtgacttcgaagctggagtgtagcctgcaggaggacggcaggggtggggttgatgcccgggagggagatcattcctggggacccgatttcctctggactcggtgttaaggcctccttgggtcaaagctccagtgatcagggcttggcctacagtccagtgattggcccatattctaggagcccctccccagtctgtttctgtagttttctatcttctagaagcttccccatagcaaactcctagtatatctacggttagcgtgcagagaaagaaatttcaatggaaccagcaaccaagatggatggaataattgtatgagaaactgagtcaatccaagtatttttgttttagtccttgctaagaattcagaaaccgactggctcttcagaagggaggagtgtgcatagatcactttttctgtaatgaaaaaaaaatttttttgacaatttgaaaaggacaaaagtataaagaacccgtacttaaaatggcgacgcttatgaatgctgctaatggagacttggaaagttctcttggatccagtgcgacaactaaccacttcttcagaacagttagaaagcacagcgggtggtcgagttcattactggctttaagaagggcaacatgatagcgaatccaatttaaccatactaacaatctgaatttgataaggaatgcattatgcttgatctaacggtgtgtgtggtcaaaatggtgagccctggtagctggatggtaaagccatctcattgcctggtgagaccgtctccctgcacaccgcgaggttagtgctgtgggccagtatgccacactggaatgcctacgtaggcctggctgaaccaaacccgtatgctactgagctggtctacgtcatccctccccctcctcttgctgacccatatagaagtcaagcaggacaagccctgaggcaccttgacccttaacattctaataagtggcttcatcaataggaggtctagacaagtaagatattatgggtgagagaaggcagggagggaatcatggggtcttcgaatacctgctggccctccagcttcgagacggacttagcagacctgagttggtttactcctctgtaatgtagagataatgtcatgagattactggcatattatatgagataatattatatgacatgcctctgccatatgcactctttattgactgttgttattatattatagatcttggaagtggattgtgcctagcaggacaaatatgaacattccgagaattgagaattgagccgcaagatggcactttagaagagcttgtggggcaggccggaagacctgagtacaatccccagttcccactctggaacctcactccttgccccttgacacaggaacactggtggcacaagcatgcctgccctcacacatgcaaacacagatatgcacacgtaaagaaatgagaaaaaatattttaaagttttgcttctggaaagaagctgagaattttatatacaaccagatgcagatacttacgtcatgatcatcattagaagtagtttttgatctgggtcggtagctaaatctctatgggaacgagtgctcccatgtgtgcagaggcatcatgggtcatgatggagtttatctaagggacaatgatgtgctattatgtatgttatgctctgtttggcttactcttcttaatggacggcattgatttctagttctttggatttctggagttaaacttaaaagttttctaggtatataaagtcccctttctcacccctcagagaaattttacagctttcatcagactctcaaagggatctgtgatgaaagaaatgtaaaagcgtgagtgtttgaatttcctaaataagtgtgaatcacacatcctgtccttagatgggtgaatcattatcagtaattttgccccttaagacttggcagagaaggcagaggacagatatccatcacctcatcatctcaccccttccttctctcagtcttttaacaaggacaccttgttaaaccttgagaacttcccatggacgtggaggcaaggcactccatattgagaatgcaatcattaaaacgtaccagagtcccatccacagcagccgggggtaatgcagtctctgtgttaccaaaggcgtgcaaatggaaggccgttctgtatgattaggaaagaggcaacggtgcctggccttggttaagggaggcttttcagcaactcctgatatctatttgcattccatcgagagagaagtgacaaactggcaagctgtctctggctacctgtgatagaagcaggccaggagacagtgccaggaaatgaagccgggtgggattctagagcccgaggcatgaatcagaggacagccttgtggtaaatgatgggggatttttatggtgagggtagtgtggtttgtttcttttttcttttttttttctctttttttctttttagtttttccagacagggtttctctgtctagccctggctgtcctggaactcactttgtagaccaggctggcctcgaactcagaaatgccgcctgcctctgcctccagagtgctggcattaaaggtgtgcaccaccacacccagtgtgcggtttgttnnnnnnnnnnnnnnnnnnnnnnnnnnnnnnnnnnnnnnnnnnnnnnnnnnnnnnnnnnnnnnnnnnnnnnnnnnnnnnnnnnnnnnnnnnnnnnnnnnnnnnnnnnnnnnnnnnnnnnnnnnnnnncgggcagtggtggcgcacgcctttaatcccagcacttgggaggcagtggcaggtggatttctgagttagaggccagcctggtctacaaagtgagctccaggacaggcaaggctagacagagaaaccctgtctcaaaagcaaaacaaaaacaaacaaaaaataaagagggaaagtccgtcccctgccatgccaggcttcttgatgctttgttgccaagttgttggcacttagtctgtcagagctgttagcattaggtcaccaattccacaggttgtcagctatatctttggaagacaggttcagcctctctgtggtagtggagaagagcagaggcaggtgacagaacaatagaaccatctaggtcagaaggctccaccccaggtggtctcattcacagtggcagcaaggtctgaatcagcctgctcaaggctgggggaggctacactttatcatttctaattcttgcttccagagaagtggttccaagtgcaaaagaataaaaaccataaatgtcagaggaaaattaaaagatacctatgcccaataatttattttgccaattgagaaggaatcaccactcactgcagtattggcagttaactattacagtgccctggcttatcccgagggctactgttgctgagctgagcaagatggtacacagaaaatgttattttacaagccgcatgaagcatgactcaattgaaggaagatccaagtaattgatctttaggctttaggttataatacagctggaacaaactttgttggtagactgccttctaagcaacctgtccttggagatgtaatttttaaaattttatttggactcacaagggcctcataaactcccactgcgggaggttatgaatcagccttgctccataacaggctttgttctagagtgaaaagtgttagcttatataaggacatataactatacatgtgcctctgaggtgtcattatatgtttttactcagcagggaggccatttaaaatcctgaaaacttgaaatgacaagtaatcaagtaaatgggccccaaaccctgagcactcaggtggccccgggcagttatcccgtggctcagaaagctcataaagataacggattgcactgcaatcccacgccattgcttgaaaacagcctttggtgcataagtatttttcccgaggacagcttcgtgcatcagcgctttctgttttcatttcaaggccatttcaaaagctatttatttttctgggtttcaccttgttgtagaaaaagctactttaatagccagatcagaatgggatcgtaaggtgcaaaatgcatctttctttttgtcttctttccctttcccactcagtccttattgctcatgtgcggctggggagccgtttcgtttgatctatatcgcaaactaataacatccctcattattattatttatttattttttcttttagctggaactgcgtttccagaaccaccagctggcccgaactttactggatttaaacatgaaaatgcagcagctgaagaagaggcaggaccaggagctagcttccaaaccccagagcccgcaggataaggagatgaattccgagtgtggaagcgcatagtggagagtccgaggccaccactccaaagcaaccctgagccctcgccgtaacagggcgctctgaaaccctcctagcattaacactagcgatgcttatgtgtgctctaaaggacaatttgtccagcgaaaacttaggcttaaggaagaagtggggaaaaaagctaagaaagggggcgagacttttttgtttgtttgttttaaaaatgttcattcattggtttgactggttattgtcttattagtcgaagggaggaggggtgaggaggatggaggtggaagacaaccaaagcactaaaagtttgccttaatgccagcttacaacgctacacgttaccttcatgtagcagtgcatgaacttgcagaatctgtgctcatttttactttatttatttttggctgatctagtagccttcccagtcctcttctgatttgtgaagctgagaattacttgtgtctagattccacccataccctcgatgtggccagcgagaagggcttctcacctttttgctgaatgtggacatgtatttcaggacttgctgtcattgaaatggaaaacactaactattcttctcataaaatttcttgcttcagttgattcaagtttgatttttcaagatgcacacccctagattcctgactaatttagttcttttgttcagttaatttgggagtttaagtggttcttattgaattaaaaggttgaattgtacacccaaagtgctttacaatgcaaaaataaacttaataaaaatagttgcagacc

SEQ ID NO: 372 - DNA, 1434 bp, Mus musculus
atgggcaaggagccgagcagcgctctgagtggccgggcagtaacagcgtccactgccagggtcctgcctgttccgttaactgcccccgcccccgacccgatcggccttaaaaagctccaacttgcaaccaaatccccagtcggagcgctgcagaaaaggaccacgatgggcttgggtgactacagccactgcagacagaggatgtcccggggactctacggagtctctggaagggctgcgctatggtccccagtcttccacccggtgcaccgcatgccttgcggcacctggcgcatcggcatcgaagtgccagagcacgtccgggcgtccagcccggtgctggagcacctccgcaggcagctggagcgcgcctttcagcgggcggcggcacgcgggcgcgccagacgcgcgcgggaggcggtggcggcggtggcggcggccgcagcggcagcacgggaggaaaggagccggacgcgcatggagtgcgccctggcccggctgcgcgcggagctgctggaactgcgtttccagaaccaccagctggcccgaactttactggatttaaacatgaaaatgcagcagctgaagaagaggcaggaccaggagctagcttccaaaccccagagcccgcaggataaggagatgaattccgagtgtggaagcgcatagtggagagtccgaggccaccactccaaagcaaccctgagccctcgccgtaacagggcgctctgaaaccctcctagcattaacactagcgatgcttatgtgtgctctaaaggacaatttgtccagcgaaaacttaggcttaaggaagaagtggggaaaaaagctaagaaagggggcgagacttttttgtttgtttgttttaaaaatgttcattcattggtttgactggttattgtcttattagtcgaagggaggaggggtgaggaggatggaggtggaagacaaccaaagcactaaaagtttgccttaatgccagcttacaacgctacacgttaccttcatgtagcagtgcatgaacttgcagaatctgtgctcatttttactttatttatttttggctgatctagtagccttcccagtcctcttctgatttgtgaagctgagaattacttgtgtctagattccacccataccctcgatgtggccagcgagaagggcttctcacctttttgctgaatgtggacatgtatttcaggacttgctgtcattgaaatggaaaacactaactattcttctcataaaatttcttgcttcagttgattcaagtttgatttttcaagatgcacacccctagattcctgactaatttagttcttttgttcagttaatttgggagtttaagtggttcttattgaattaaaaggttgaattgtacacccaaagtgctttacaatgcaaaaataaacttaataaaaatagttgcagacc

SEQ ID NO: 373 - protein, 216 aa, Mus musculus
MGKEPSSALSGRAVTASTARVLPVPLTAPAPDPIGLKKLQLATKSPVGALQKRTTMGLGDYSHCRQRMSRGGVSGRAALWSPVFHPVHRMPCGTWRIGIEVPEHVRASSPVLEHLRRQLERAFQRAARRARRAREAVAAVAAAAAAAREERSRTRMECARLRAELLELRFQNHQLARTLLDLNMKMQQLKKRQDQELASKPQSPQDKEMNSECGSA

SEQ ID NO: 374 - DNA, 150677 bp, Mus musculus
  misc_feature (1)...(150677): n = A,T,C or G
cccactgatcgaggcattttccccctttttttcttttttcttttcttttttttttctttttcttttctttttttttttcttttaaaaaattcgatcaaccgttctccgtaccggggcttttttctgtctatctgtctgtctgtctgtctgccaggctggctttcccccaccaccacctctttcccacggagcccgagtcgggcgccgggtggggagtggggagtgggtggggggagccagcagagttccattttggaacgcccgtgcctcgtctccgcgttcccagcccgggtccccgcgttcgcagccccggcgcaggtaagaaacttcgccccggcgcggagcacccgcagcgggcaccgccagcccggagcccgacacgccgggcgcccgccactccagcccaactttcccaccgccgccgccgctcccgaaaatgtgttgttaatgggacttggccgggttaggaatgggggtgcgcgggaggggggtgttcaggctttttttttcttctttttttttttttttttttgagggtgggaggaaatccgcggtttcggggagaggagtacggagattttttttttttttatgaaatagttttgattacaagtttggataaatggaagccagaccgaggaggaggaggaaaaacatgtctacgtttccctatgtcgacataagccacaaaaaaatatggcgtccgctttcgacagggcgttacgtagactcgactctgttttttatttatttattttgtggccggcttcctgccttcttggccaaactgcggcgctttgtgcaaaccgggcaggtcccgcggggactccaccgggacgtggccccgtctcggcgctttttggaagcctgggggctgcgtgtggctgcacccctccctcccccgctctcccctctgctcccctctcctggtgacgattcgccgtaatgtggtggcaggaagcatgacgccgtgttgaggctgcctctcctcgcgtcgctcccggtggctgcaggcggccggcgcgcagcgcggcgcgggcggcgggcgagggacctgcgggcagggcctgagtgcggcgctgtgcccacgccccgctcaggtgcgcggggagggggatgcgggggacgcgcggaccccgggggccctgctgtccctggcctgccgggaccagccggaacccgggtctcccgcctaagtggccgtggcgttttccagtctgccccacaagaggttaagcattgctggctggcgttggagcgtctttgtggcttcccccaggacttgggatcctgagctttgcaaacttgccctttccctagcagctttgcaggagaccaacaagctcggaaagttggaaaacaggagcatcacaggaacgtccctttggccccctagctgtactgtgctctgaaggtggtggaggaggatgaggagagcttatccaacggggtgggtggaggagacctgtcgcggcagccaagtcgtgatttgcccagacttccacctgattgattggcttcaaagctagtggggtctctgtgttccactgttccgcgaaggccttttgttgggggcggggaggaggaggaaacacccctccctcttcagagtcaaggctcagctggggccccaggcatcactgtcctttaaagcccagcgttctccatttgctgctctctgaagatctctttctttctggaagtgaacagctcctcaattttcaggccagctccctgttgaagcaggatataggagactggaatgcctctctgtgaccctctaagctcttggacttcccacaacaattctcttaaaacatactctctcggttttttggctgctctaagagtagagcagaatttaatgccatggaagtgaagagaggctgagcgctcctggagacttaagtcaaaaggtgattttctgtttctaagagcctccagtttaagcggttcagacccagggcagtaatgtcaaaacgcatttggatgacggccaagaggaataaatatcttgttaaatgacctgtttgatagtaaaaatagactaatggggccggcaagtggttccgtgggaccaacataaaggtttaagtttaaagtgaaagttacataaagctgtttacacttgttcttttaaagccaggggggaaatctaagaataagattttaaaaaaaaatgtctccctgacaataatcaggcctgtggtgtgtggaatattgttactgtttaaaaaaaaaaatctcgactccatcactatactatgaacttgtatcttactttctagcagggtttgatgtcagctaaggagaaaattcagaaggccgaagttttggaataaatcagtgacacatcatttaaagagcggggtggaaaaataaaaagcaaatacactgcaaacgttggattcccaggttgaaaacagaggaacttgatttgtccagtgttgatcacgtcctggtgcatcaggccttggtggttttgagaacactgtgcctttaacaaccctgggggagggaggggagatcatgttgctgtttggtaagtgttcagagtactgctgttacagtatctaagcttgctggatggttagcatgctttatcatgcaatcttcaccattaccccacaaaccaactattagtattgtctttagattctggtggaggaaacagaaggctcctagaagtaaagacagcttggccaacccacagggcacaatgtagagagtctgtgttgacgccatggcatccatctctgatccaagggggtctttacaatgaccaactacagggtcaagtgcaggcagaactgagtgcaatagctactgccctgggtctccactcagagactcatctggatttcatttgtttcttcattatttggcgagtaagcatttgatgcatttgttcattcaacaactataatgttccggatactaacaagagcccacagtcattaaacacttttctatgccagacactatcctaagtgcttattattagactattttgtcttcatgacaaccaggagatatagaggctaccgttctctatagatgaagaagcagacacccagagaggtcaactcacttgtcctagagcaaacagctcatgagtctcctgtcagcacccgcagcatgggtgctcccactgctgacacggtgcagtgcaccagacattgtggggatgcttcggagaccagagcccctgggctgggcacaaagcttggctccacgctaatggagatgctggtgggataaagaccccctaccctctaggagtttgaacagacagtaggagagctcattaggcccaatcaagcagaattaagtaagtgctataattgaggaaagcagccattgtggatgctcagggagggtgtgattgtgctgcttgctcagagggcctcacggggactctcctggaggggatagcatctaaactgaccggtgaatgagaaaaaacaatgcctgggtgaagttgcataggatagcattgattcagctgtgagcaacagaaattccgaaggtcacatgacatttttttgttggggtgggggggaggaatgctgcctcagctgtatccttgggaacccaaacggtgtcctttttcttgtgtctcccttagcatgtgggtcttaggcctgaggtttaagagaggtactgtctccaggcctccaccagagctatgctgtgtggtgacccaagtggaccagggagagattggtcaagtgttcttagtcaggcacattactgctgtgaacataatggagtttggcttacagggcagaaagggggtgagtagctgttgatttagcaggtaggatgtctgaagtctcagataggaagtggaaaagagctgtggggggaggggctggaagctgtctgcagcctaggaagcggagaaagggatgcgggaaaagatgtgctgaggtcagatttcactgtacaggtggttagatttactctgtagtgccaggagccatggcaagcttctgagtagggactgtcacatattttaaggaaggtaagagaaaggctgaagcaatggacctcataccagcgaacctgcttagctctcatttgacctagaatgaaatcaaggacattttcagagaggggccaatgtcatctcggagaaaaaaagatggcagagtacaatggagagggaaaaggagaggagagagagtctttagatcctgccagtaggaatctaaaattaagccctggtactgaagagatggccagggggagttcatagatttccctggccagacagtctagctgaatcagtgagctctgggttcagtgagagactgtgtctcaaaaactaactcaaagagtgatagaggtcagtatgcaatattgctctctacgttgtgtgtaaccacacacgcacacaccctcgagctcaggcacacacaccacccccccaaaaccagaaatccaaaattattttgaggcatttgagctgtcccaggatgtgtgtgcctctttcaacagtgattcagtgcatggggcagaggacgttggacagaggactttaccagtcaagcatgccattgtcttcttcctggccttctgcaattcctgggtcagctctacctctcaacgacagaatcgccttggtccgatccctcattgctttaaatcaagatgtcctgagtgggcctcaaagctgtgtccgttccctcatgcaagactttccagcaggagtcaagttctctgactcttctctgctcaaactctattgcttgaacacagttatctgcctctctgagccttgtgggttttggttttgtttgtttgtttgtttttggttgtttggttagtttgatttatttttgtcttgaaacagaaccacttgtagctgctgtatggattattgtgaagcttaagaagttcagacaagggcttagcacttcgtctaacatgttattggactcagcaaaccagccccaccactgtcatggtcactgcagcctcctccaaggaatggggtcctggtatcttgtacttagcatgttcagggttaaccatccaccagggactccccctgttctcagctcatcatgttctcctcttctctgaacacagccactcattctgtggcaaatcacagcaatggaaaccctaaggagagcctggtgccaatcactggcacatcctgtgtggcatcatggtccacaccctggcagagccatgccgagggtcacgttgctatctccacgccccttaggtagacacttgggcgggcattgtgtgtaattgataaagtagttttcttctgaactgaagaggaaaaagagagagtaagacaaggcactgtggtcctgtttctcctccccagccctctgtaaagcccccaccctacgttgaacaggttgtgatattaagagcatcctcccacaagctgtttcctgttctgtgcttgtagtcaagcatttaagagaggttgactggcaatggtgtgtgtgagagagagacccccaaggagcaaagcagccttaacaacactacgtcagtattcacccaaatttctccaagaaacagaaaaggacaggaccagagagccaggctccctgtgccctggtggaaggcttaccccctaaaatcctcagcttacaccccttcttcctcctatcctcccctccccaccccaccccacttcctaatatgagaaggttcctggagattaagtctagccacactgtgtttatagcaatagcttttaatatggaatgcaatctgcagtgaatgaaatctgtgtaatattgatccactggaatttcaatagtagggagcacggcccaagtgttaacttccaggcaaaaggtttatcatctgccttaggggtacacagacttagtatgcaatggaagagttacaggcctgcgatttatttatcttacagaaggaaacagtgaaaatcccagggaaaccatttgccatgcggtaggaggaactgatttttgtatcccttgggtactggtatggccaaaaagagtgagctccttctttggaggaggaatccttccttttggggtctcagggcccatttgtgaaagagagaagctggcctggctgacgagttataagcagaaggccctgagcacagcttctctttggtctgcttagatacctgcagctgtagctgcaggactctaaaccatctgcagaaagtaggggtggggggctaagaattctatgttagagatcaggcagcatgcatggatgtagacatcagctgcatacaggtgacagtttcaaactagtattgcaggaagattccagaaaaaccctcccctgtgggccagctatactcccagtcttgtcagctctgactggtgagatcctggctcacccaggcacaccacaagcccacacatcagctcatctgaagaacggcagtggctactgtgtgccagacaccgggatgaatgcttccccttcattgtgacacttaattggagcaggaggagtgactggggagctgtgtatggtcccactgcagagattggaatgcaaagctcagagagccaaagccctggctcaagaacacagaggggaggtaggtgggtcactcagatcagtttgtttccaggactttgaaacacggggacagacaagctccaagccagactgtaaggaagtgtggagagaggggttggtttggacatacttttggactctatctggttgcttggcctctgcagagatttagggagtgggccaacatgtgtacctgtatggatacatacaagaatatgatcagaactgggattctaaattgtcacctgtcgtctggagaacggtgccaccctgcctcagtcaggggcacctccatgctctccctgacctggacagaaagaatcccagggagccaaaagctgtagaattgggacccgaagaggagcttgggccttcaggatgcagcacagcctcgctggccaatgaggagcaggggtggaaggagcaagcataggggtgggggcggggaatagctgtgtggctgtttttatacaataaaagaggatcattgtaattgggaacctttgaatcataacacgtctgcccatggctctctccagctgcagagccatttagttaaatagcacacagaaaactcctttcagctgctattacgttcccgctgttcttaaaatatgagacaaggtagaattgctctaacgacaaagccatctcaggctctcccagcccctgggcctacccagagtccccaaaggatctccatggcctgtggaggatgacatgttgaaattattttcatttaaactttgcttctgctttcctagaaacagattcaagatacctgcacacagcttggcccaagcctgaggggacggacggtcacggtcacgttagagatggcagaggatgggctgtggggaaagaaagcacacaccccacttcttgggatgggggtgccttgtctttttctttttaatgtctttgtgttggtgatgttagagtggatagcgggaacatagggactggaaacgggaagctgggaaaaggggttgtcctccagccaggacattctggaggaggggtgagctccaggcaagagcaggctgcactctgatctcttcagttgatgcttcagcttctcttggtcctctggaactgccatctaccatcttctggggaactttgtgttacaaaaattgattctgagcaggcagagtgctgctgctgctgctgctgctgctgctagaaactagagctatctcgctgtaaggttgaataatgaactcgatcacttcaagggtaaatggtggatgtcccagcgaccaacattctaactaacagtgtgcagttggacagtgtctggccttggtgcttttagaaagagggcgctgggtctctaagtgcatagcctacaatcagttgaaaggacattcaaggaaatgagtttattagtaggacccagggatgttccagcaacaagaaactttcaaaaccaaccccagtgcagtggcacacacctgcaatgccgtactgggaggcagacacaggagaattggttgaaaagggagttctaggctacatagggcaacaaagtgacatgataaggccctgcctgtctccaggcagaagggaggaaggaaggcagggagggaggaaaggagggagggagggaaaaactgagacctaggaagctgtaccaatcaacccaggatcccacaatcctggagcagttccctttgatgtctggcgcagacacttcaggcctttctgcttgctttatcagccagctcatctctgtaccttttcctccccactaaccggttcctctttcctggcaccaggggagcacctgccagagtgacagatcagtgtccctcctctcaggaagtccacacacaacagtcctgaacccccagcccacgtagctaagcctactgatgtcttgagttcagttctaggcattttgtggatgtgcttctggcacccctaagagatattagatagcctcctgcttttgacaagcaaggcacacagaagaggaagacatttgtccgagggctcctgaagccatgcagtctaacaccatctagctccgtgactaatgaggctccgggcatacattgcttcttctaccccctgtgcctatggttagcacaaatgggggaaccggaacttgaatgcagccatctaggatccaagaactgaagggttttatccacttcaggcctgatgcattctgtagctctttctaggaagccgatatcaaaggcgggtacgttactcagaggtacagaatcacaagagactcccaggttcatccctcagagtctcctatgtggggaacgtttagtaagctgaggtaattataacaagcacttagtggcatgaaaaccatacggttagacggatttaaaactctggtgtcaggctttgtgaagcttggagccacacataagtgggacccctgtttccttttctttatcttccttccttcactccagctctttcttcttttctccatatgtagcccaggctggccttgaactcacaaccttctgctgggattggagaaggtgcagctaagtcttttgaatgagctccgttgaagatagcacattaaattatcctacctaaagtataccaatactgctcttcagggtctttacctaatttatgtagccgtcaccatgacgtaacttcagaacacttccatcacccccaaacgggacttggagcacccattagcagccgctatccgtcaggcttaccccctcccccacttcacccactgtggacagctgatctacacctttgcgatcatatagcctgcaaccatgaaaagtcatatagcttcgtttacatggcttaaagcacttgcggtcatctgccgtggagtagtgtctatcagtcttttatcccttggtattaccgaacagtaccacatggggaagatataccttattttgttatctcttcaccagctggcgagcacttgggctgcttccctttgggggaatttgagaaggccgctgtgaccatttctgcacatgtgttttcatttaaggatgaatttttgttgctgtttgttttgtgttgttttgagacaagatagcccaggctggcattgaaccctcaaagtagctcaggctggtcctcctgcctacctacctaatgctgggattatagacatgcaatgctataactcatctctgttgctgatcttatctgataccttctcagcctcctggcctttcacagttggagtatggaggggatgcacaatctataggaggggacttggggagtttactttgaaacatctagatacagaagagatgtattagttgttcaaacaattagaatggcaggtgtcttgttactcagcttagcccaaggctacataggccctgtgtgtgtcttagactcactcttaacaacagaagctcaggggttctgctcagccttccagctactcctcctagccttgtgcatataacatgcttagcatctagctcctggtgatcagggctctctatagagaaggtcacctctgcctcacactgcccaccaatggtggagctctggggagacctcaagctagaactctgggtctttctcctttgagtctctcccctccccatgccacaagcgcacctagccctgactaagtggttgctcaatagttattaaactggtaagtggaattgaatacaagagagttctccatgtgtgctgtgctctgtgtgtgtgtgtgtgtgtgtgtgtgtgtgtgtgtgtgtgtgtgtatgtgtgttgaaacaggagagcagtgtactactggctctaactacactaaagtgaatttttattttttggttttcttgtttgttttctctttgtatctgtgttttgttttcaaataagaagaggaagtcctgctggaagggccaatgatttgtcatctgtcgccaagccctccctcagctccacctaggtgtagtttgaaaaccctgaatccgttgactttcactaaaccttccctggtcactcggtacccagaagtccaacccaaatgcttccgggggatcagcaaaggtgtggcagactgaagggtaaagtatagactgataagatgtggtttggtaagatagaggagaaaagcacgcgccttagctcttagcatcaggcctagttctccagttgaactctccaaccttcctgcaaacgaaagtaacttctgacccatggggtcaagtccaaattcctgaccctggtacactggctgtcttggagccaatttcttcgtagcaggcagatttcctctaattgctttacctcttgttgcgtgtgccccatttcagttgctccagacccccaagagtgccatcccttcccccatttatagctttgcacatgggactcccccgcccacatcccaacctttcctttccttctgtggtgattcttgcccctccccctgagaggccagggtgacctgaaaagagttgtcacttcgtggattttgatctgattatgtatctgtttgcctggaggagcgggggaggggaagggaagggtcactttccaccaacagggagagcttcctgtttgtttgtctgtcttctctgagcaccagttcaggactggtccactctgggggttgagaatggaggtctgcagagcgcctgggtggctgcaagggtgagcaaaaggctctctttccagagagagacctccaggagaagggttgtacaggcttggcccaagtgcttaatgcgctgctgctcactgctgcccctggtggccagtctgtgccaaaggactaactggacagttttcaaataggaggccatcaaggccgctttgccccaaaagaactttatcttaaattcagaggcttttggcaacctctgcctgcctgcctgcctgcctgcctgcctgcctgcctgcctgcctggtcccagcaggctgcctcatctggacacgcaggctaggtattttttggatcagcttcctgcttttggcagggtgtcattctttttcctcagaagcaccgggcctccccttctgaatggcaaacggggtgtatgagcactgtccctgcagggcctttctactgcttccagttttagacttagagagactgaactggaaagctaactttaagttgggcaacgggaagtggggtaaagtatagagcggtaggaagtggcacaaaaaggtagtcgttctggcagtcaggaagctgaggcaggaggatcatgagtccaactgaggccaccctgttcctaaataaaccaaaacaaaattctgaagtattaaaaaggggggatgagcttgctagacaatcgccactgaagcaagcatggtgtgtgtcagacccttacttaatgtaatttaagattccccaacttggtaggaaatttacagccattttccacaggaggaaactgaggctacatgacacgaatctgatggagtacatggaaatggcagagctgtagtttaaagccacatctgagtgactgcagagtcaaagtttttttcctgtcactctgtaaagagtgacactgaagaatcagtgtcacacccttagcaagaggataaagagacctgccctgtcttcccctagtgtggcagactctgttcatgaacaacaagactggagccagcaggaacattttctctttcctggcaaagatgctttgggcactactgcagccccttgtcctcatgacactcttgtggttttgtcccctgtcaaaagagacggaagaccaataaccctactgaaccagcctgtgcagtgagaatccttgttaggtttataacttcatgtttgcatgcatgtgtatgtgtaatagtgactagcaggccgttcttcaaggaaggtacatgaaactcagtgacggttatttttaattgtcaacttgacacagtgtggagccacctgggagaaaaccctcaaggaaggactatctagatcttgctagtctgtggttctgcctgtgagagttaacatggtggaaaaacccaccctacatatgggtgccaccatttcatgggctgagccctgaactgtgtaagagtgaaatcaattgagctaagcagtatgtatacagacattcatgtctctctgctcttgactgaatgtggtatggccagctgtcccccgtccctcctaccttaacttctctactctgatgagctatgacccagaattgtaaggtgaaacaaacccctttcctcccatgatgatttatgttgggttacttgtcccaccaacaaaaataaaatttgagatgacctccagactagcataaggtgtgatgctgtgtgtgtgacagataagccccactctcccaggggcttaacaaactagggtctgcctctcaggaagtcggtcccctgaagggtccaaccacagccctccagataactttattttaagctctgactggagggtccaggctgctgagattttatagttgtgacatttgaagccaccagctttctggctgctgcagcaaagaaagagagagggacatcaagccactctcagagatgccacgagtgctcacacggggagcctgggcagtgttcggtgtgcctgattccttgttccatagcaagggggctctgcccatcagagccctggctgtgctgctccagcagacaccaactgcatcggctctgttttggtctttgtgtgctgaaataccaaaagctttcgcccacctctggtagcgcctgctcttctagagttaagactcagtccttgcttgaattgggagtcaggaccacaatgattattagcaggaaagccaaggcctaagcaaaagcatccaggaacttagtccagggggcatcttacagctttaaggcagcaccaagttcccctctcagtgaaaggtgaaggagccatcgtaggaaagtgaaaagccaccaaacattttgttgttgttgttgttgttgtaatgtattacctatttcacgtacacttaggagcataccattacagtttcggtttgcactgaacactcagtgtagcataaaggttaacattcagtgaggccccaacttaactgcgaagcatcccagtacgactgctaacggccccagttcaccccagccgtcagcgtgccgcccttccacagcactattgctgaagcttgttcactccacccgtgtgaggtcattgctgtttctctcctcctgaaagaggcttggggaatctccatggaacaattgagaaaagtgagacaacatttaaaacgatagctaagaaagggtccaagctgagcctcacagtgcagaggaatggctgactcgatacgcatcactgttaggcggcgcccaaagggccagggcttcactctcaggactcacggggtttcacacattctgcaccaccagccattctggggtcagtccgaggccgttgggattctgggtgcttggcttgtttctgcgtgtggtgttcctataggaagcaagcacaggattgctatatgctaggtaccacattaaatgttaggcctatcgtaatggcaaaatgaaacacgtctttttccattcaaatctgtttagttcttcttcaaaggatcccttaagaaccttgagctccaagaagtgggagtgggtgggtgggggagcatgtgggggacttttgggatagcattggaaatgtaaatgaaataaatacccaattttaaaaaaaaaaaaacgaaccttgagctcagcactctggtcaggaagggttggttgtctgtttggattttggctctgaaacgttgcctggcagatgggttccacgtgggcagcaagccttcttccaccagccaatcctgggactacccagcaggcagtgtgtgtgtgaccgactttgcactggtttctgtggtgaccagtcagctgaccgccttcaagttcatctagtccagccagccgtggctttataagatggggaatgtggactctccctagcctctgaattactcagggtcctattgctagtatgaagtgtctccaggttagatggtttcatagtaccgctctgtataaatggtacagtgaagcttcctctttatggcattaaaggatgccccgtaaatcactttttgcccttgtgacactttagaccattttcttttgcttctcctctctacctatagtgtccaggactgacagtgacccaggactgtcttctcatctgttggcaagactcgagggaccaatcacagttgtaagatctgtctcagaagagcagactgtgtccagccttaaatgtttgccagtggaacctgcgctagaaccttgtgattccttttcttgtttggtttttaatatcagagtttcaggccaagttctctgctgaagacagatgtttagcctggtggtagtggtgtaggcagcaggcagagtttgaggcctacagagtgagttccaggacagccagggcaacacaaagaaccctgacttgaaaataaaaaggaaagaaataaagaaccaaaagaaaaagataattatttaaaacgatggataggaaagagactaggaaagaaaaaagaaatgtgttattaattattatttgggacatcctgagctacataatgaattctaggtcaacataggctataaataagtgtgtgtgtgtgtgtgtgtgtgtgtgtgtggcatgcacttgttagtctgagtgtgtataggtgcccatgctttggagacctaaagtcagtattaggagtcttttcttaattacttcctttattatttgagacaaggaattttttttaaagatttatttatttatttatttatttattatatatgtgtacactgtagctgtcttcagacactccagaagagggcatcagatttttgttatggatggttgtgagccaccatgtggttgctgggatttgaactcaggacctttggaagagcagtcggcgctcttaactgctgagccatctcacccgcccaagacaaggaattattaatagatcatcaatttgactaagctggctagccagtgctctgccccacccattactgggccgtagcgtgttcctccacccttggcctcttacatggtctggagatccgaacccaggtgcttgtacccgcactctgccagttgagccatctccccagcctaaagtccatggattttttttatcacatggtttaaatagtaaaacatgctgcccagctaatgggactggtttaattacgcagcagaatcagagaacttgagaggtcatcagccccctgggaagccaggaaaggcacctctggtctgggcctctctcgctggcaagcttagacagtgtgattgcatcctcgggtgtgggaagcagtcttgttcctgagaatctaagagagttctgtctgcctgcccccagcacctttcctctgaaggagtagcaggtatctgaagcagcattcgagagcagagaatgcatttgcttcctcctacaggtggtacagctggaaacagtctgccctacagactttgttcctgagagccaaagaagcaggtcatcattatatcccttccatctcagcccatgtcccttcctctgtcctatatctacgcagcagccatagccagaatcctggtggccccagctcttctgctctggtaatcatccctaaggcatctggtgacctgcctgtaacccttggcctcttcagtcccagacagcacagccaagcccccaggctgcagtggccaccctttccgcaaggtgggcgcttagtgcatattcatggaatttctcaatgctgatggacccacagtgacccttatctgagatataagcagttggagacttggcacactggtgatttgtcctggcaacagatgagacatctttgtaccctgtgctgttggtaaccccaaaggcaatgctggagttaatcatgagagtagcgggtggtcatttacaagccaagtcttttcccgggagaagacagagagggagggagggagggagggagagtgggggaaaggagagaagggagggaggcaggcaagnnnnnnnnnnnnnnnnnnnnnnnnnnnnnnnnnnnnnnnnnnnnnnnnnnnnnnnnnnnnnnnnnnnnnnnnnnnnnnnnnnnnnnnnnnnnnnnnnnnnnnnnnnnnnnnnnnnnnnnnnnnnnnnnnnnnnnnnnnnnnnnnnnnnnnnnnnnnnnnnnnnnnnnnnnnnnnnnnnnnnnnnnnnnnnnnnnnnnnnnnnnnnnnnnnnnnnnnnnnnnnnnnnnnnnnnnnnnnnnnnnnnnnnnnnnnnnnnnnnnnnnnnnnnnnnnnnnttgcctggaagacatgcaagcaaaatcaagcccacatctggaaattactctgcacatgtagacaggtgcacacactgctaggacattgcttggactctctgcacaaccttggcatccgcagacacacatgcaacctggtggtctgctttgtggagttcccatttgtagacgcctcactctgtccgtcccgacttttggcaaatggaaaaagctatacatttgtatagcatttggaggcttgtttaatagcaaatctgtaaagcaccccaaatcctaggttatcagtcaggggctcattattgctaattatctattcattttggatatatgtaataaaagtctcaggacctattgggcaaattatcatttttaataggatagttacttaagtcaacatattcctgcacctctcccatgatgactccttttgtaaagacgagatgaattttataggttgagattgacagcttttctaatgagcaatattttgatatggagtttattttattaaattgggggggggggagtctggggaacatgatgggtgtttttatttcagaaagtaaattcaggatcttaagagacacaaatatttactgtatcctctcaccgtccccaaaatgcgttgtttgaagtaggattgtagctaatggcccaccctctctctgtttggatatgctgtcgtggaactttctactatggagcacacagcccgagagaagttcatgaacaggcagggcttgggagagcggaagccaactcctccatcctgctgctgtctttgagctagtcattcacccctccgtggcctaagtttcccccacctgccttctgggctctgaatcctgtttctcagtgggctacccatcgggctggctctgcccagttcaaactgacaggcatctgcaggtgggactagcctatcagaagtccattggctcccaagttcttgggagtaaccagttgacttaagcctttctggaattcttgtaagagaacttgacttgccacctaaactgttcctgtggagccgaatctgtcctgacggttccttggaaagcctgcacagtgctgagcaagccaactgccttgcatgccttctgcaggtccaagccagtgcgttccagagcactgtctgtaaccgatttaaggagaaggtgctagaaagggaaaaagaaagggtggcagggggtggagaggaaagaaaaggctggcaagttctcagtcccagagcctggatggaaaagtgagtgggtcactgtaaggggagggcgcatgcgtactgaggagctggccacagggccctccctcctccccttctggaatgcaatgtgtatttactgccccgtggatcccagtttctctcaggaagtcattttttccagggctagaggagagtagcaggctatctctctggagaactccgccactcctggagtcagaactcttggggatcaaggggtggtaactacaggggagctgagtcagaagatgatattgaggatatataaatgacccccaccctcttgaccccactcctgctgcgagactgggaaggaagtgaagatagaaaactaaaaacagcgtagtaactccaaccttctctctttccagccccagacagtcccaaaagactatggccagcacaagtgtagcccctctcttaggcgggcaggtggggcatcatctttttgctgagggttcccacttgagagacagggattttccccttccttcacaggtttttgctggagctttctctactgtgacatccaagtctcagctctcccccaaacaggatgctctctaactggtccctaagtcatgttcatctatcctataacccatacccaagcccaggactgcttggcttggatgggtctttgttctggagttgtcctaggcctcggctgtgagctggtgtttaggagcggtgccctagcctcttcactttcccccagaaactccagattgtgtctagccccctggaagtgtgaaaacgtcccactaagaccccgggtccaaattactcccctttctgtcttcccatccctctccactctctgtaatggtccttatttttcccttggcccaatagttctctacctggcagcacactgcactcacctaagaagtttctagaaacccctttcatacctgaccataccttaatcattaaacctgactctcttgggtgtggaaactcttcgaaaagtgtcccaaatcagtctggaggccttcctgtaggctctctgatcccccctggatagtaagccaccccagagaaggacgcgtagtgggctttggttgccactgcattgtcagcaattagaacaatgcttgcatccctgtagggactcgagactaagactgagcagtgaaggaatgttccagaaactccatcatcactcatgggtgggttctctggagggagtctttcatttttgttactcatccaacaaacatcaagtctttgctgctgtgccaggagcaggagcaaagcctagagtgggaagacatggagagtgtgaccctaggagcctcccgtgtctaggtgccaggtgcagatggcagttagaatgcaaagcaagctggttgcccccaacaggcaccagacaccctgcacccctgtggaaggtgttccgctcatattttcacacttgctaatccacacagttcttcacagtaggtgctgctgccatttcccaggggagaaaactaggctccagggagttacctaatgccccccagagtcacctgatgcaaagccaggtctgcctcttgaaaatcattcactctttgcatcacttcgtgccatgtgcagaggtgagactggatgggaggcttgtgggtccccatgagcaaggcagatgctacaaagagaaaccctaccccaaccaagaaagttaccccaagctcttctgtgctctgataccatgattgtctggattcaggcttcttaggagcagaccccaaggcaaagactgtcctaaaacagttctttgataaggggaggaccactggtggccagcacggagaaagtccaataagagaaggtagtccagacaagcaagtcactgtgccggacagctagaactaaatcctgttgtaaaactgggcaccacagaagaccacacttctcagggttgtctcacaaaatattatgatccttccttaattatagtgttccattggcctttatacctctgttttcccatctgtggaaatggacacaaacaggctttattacaagcacacattagaaaaaactcataaacactgcctacaccatggagtactgtagaggcagctgagtcaggtatccaagaaagaagtgccatacacaatgccaagagagtttatgaactgctttatagacaggcaggattaaacaggatctgcaagagcaaaaagaaaaaacaaaaacaaaacaacaacaaaaccacagaacaaaacaaaaagcccaagaactagacaagaactagatgacaaggctggaagttctgcctgaaggagccagagtgggattggcctgggacttgggagaaagactgtcccatttaagagctggtataccggccaatattgacccatgcctaatgaggccagccagacaccctgctagatacactgagacatgcaagctatattcacggtgagggttgcccttgccccattctgcaggctggaagcctgaggctcaggactgtctttcgctctggtctcacagtggcgaaggagagctgggatctctacccgatgacttggacctttgactttcatctctctttccttcttcccactgtcagagctcagcaggagatggagagaggttgctgtagtgatgaagatggtggcacagagggtaaagcaggcgggccgtgggtctgcagggggatctgacccggagcagcctgccagggagctgctcgtgctgtccctgttagatcatcagagatggagcaaggcctgactcctcgtgggcagactcagagattttccagtgagtgagctactgacctattaactacaaatcagaccatcactcaggccctaaatagcgttgttactgaataatataattgaaagtattatccctttaagcttctgctaatggagaaaataaaccatttgttcctaagggttttgaaaactatatatctgttgattgagggaatccttttttttttaacattcattcagaattctacactgcatgcgaaggaaagcagaagcattacaatcaggggttataggtagagagaacaaaatattgatgtgtgagacatttagtggtgaccttgcccttgaagtgaagggcttaaggctcctgcttgtggggccaaggatccatggaggggacatgggatggccacagtgagggttaagatcacagcgataatgatatatgtagggtccaaggttaatggcagcatcgactgatttcttgcatcagccaccctgaccctccagacaggtcccttacctttttccagttcatttactcatcatataatggggcttataattccaattttaaatacttgtaagacactactggtctatttttgcccaactcttctttcatgtgagggccacacagctatatctgaagataagaaaggtcagggtgagagacggcagcaccaacagtaatagtacaatcacaacccctttcaccaagaggtctttctataatgcccaatatataggtatataaaaatagatacacaaatagaagttgctgaataaatcatgaagaaatgcctcttactataattctttagtatatatatttatttacatcatattttgcatgaaaacaaatcacacagtgatgagacaggtgtattagtttattctttcataactataaagatttaaaccttggctgagagtttgatttcttaagtcacacagcatcttcaacatttttcagatatagtaaatacacaagactaagaggcagacagatgtttagggccatttcagaagctgtagggaatcctatcttaaccccaagtgaaacttcagttaacagttttatatgaaacctgtcacccactcagatagtaacttttaaaatccaacatcctaacctagcacaattcaaaggtatagtcatttgatacttatgtgctgagcaacgctggtaggcaaatattaaaagtctttgtcctctgtaattacaccattttgtttccgtgagatctggatttttgcatggataatgaaagacactagaattcataacatgtattaatcataatatacaaaatcactaattaagctgggtgtttgtagtgtgtgcagtagcccacacatgcaaagcaaagcatgtatgttgtatgttcacaaccaaggactcagtgccatcataagacgaaacatggcgagtgtagccataaacagctggtattcggtacacatctgatttctagttcacctctggctatcacacatcttcagaaaccttttactgttgccgatttgtttttgttcagttacatcgctactctaccctataggttaggaagctgagttctagagggtgccctcactattcagcaggatccacaggctatctgctaactcatgagtcagggtgacatctgaggagccagtcacagagaagggggacactgtgccgatcaccaagccagtgagtgaatgccctcagaaagatctgcacccagctttcctgggttgattcttctaacaatgcatacacatcttaacagtaaccacagagccaaaggaagccatgtcctttaaaagctagatctggaaggaactgggatgttttgtgtctctgagatgagatggtaatgaatgccattaatcctacctcctcaaatgagagacaggacacttggaggtcctgaagtcatgccacatttggactgaaacagcaaccaaatttgccatgcttgcaagaagtctctacaagaaggtcccccatgaaaaggaagcatacctgcatgtcactttggcacagttagttacatccaccctgagtgctttcagacaacagaggccctgtaccttctggcaggcatgtttgtgtcccagaatttatggagagaggtagatgtgagtctaataactggccctctccccacacaacccctttcatctccacccctaccccaccacccatcctggccacatttatgtggccactttatcatctgtaagcaagggtcaatgttgtatagttgctatctagtctatctgcatattaaagtgttctgtacttaaacaagtcatacactaaaaatagtagcaaagggggttagaaaaaaatggcctttgggggaacgtgatggaagtgggtaggttataaacgggtgtgttttgttataaacctttcgaccgaccgcgggctcgtctttctttgctaaaaaggtatttttagacatctttgagaggttatgcaagtccaatgctatgcacagtgcttagcaagtggtaagcacttagtaaacagaggccactcatttccatgcagcaggctgacttgctggcactgaatggctcagaaggaacttagggttccctaattcaactgcttgcagccctaaagctccaaaattctaggacgggaaagggaatacacaggcctcggcagcgtccctctcaccagtcgggccctctgatgccttctcaccccgctccacgaggagtacctcttcctcacccccagtcctacttgctgaatagggtaggtgggcatgtaccacagtcctgacctagttggaaccctttaccagagtcagcctctggagcctcagtcctcgtgtttccagaccatttctaacgctgtgttggagaactgaagggataaagaagaggttaggcgaatccagcacgggcttgccaaaatcaggaagagccagctttacttcatttttaaaaaatgttttctgagctgctgaatgacgggggtagaagcaatgaaccaggcatccctgccttttaaatcagggtacctgaggaggctagtcatctgtcccttggacaaaagggtcgcaggaaaactgcagatggatcccgatgacatcagctgggctgggggaccagtttgggagcttggattctctggattgactgccattctgttcgcggtttttcatttgtagcttgtatgcccttaagcgctacctactggtgttctccagcttgtaggcctcagaatgctcactggtacttatgacctaatgtgacaaatgaaggcactttacaatcccccaatgacctgactgtaaagctgtaggaaactgtaaccctgcctccctactggcttgcttggatcactaaatgtaacaacacagaaaatgcttgacctgtagcccactgcttataagcatccagtccgaggtcactgtcacttctttgtggccagagatgacctgaagttggaagcaatgatgtctcaacagacaggaaggatgaatgaaatctagtgactgagacatggtggtaggggctctgtggatacagatgcaggcagggccgcagtggatgacggacataaaacacgtcttttaacagcagcctatgagttactttacttgtaatgctgtaataaaatacccagaggaagcgatgtcagggatgacggttattttaggcatagaaggcatagcatcagaagcggctgtcagctgtggcagcgggagcctgggacagctggtcactttgcctttgcagtcaggaagcaaagagacgtgaatactggagctcagctcactttctccttgttactgagcctagagccctggccatgggggaaagtgctacccacatttaacatggttcttcccacttcagttaacacgatctagaaacgccccacagatgtgcccaaaggtctttctcctggggctgtggaaatccaggccagttgagcataagggtaagccatgggctgctgagcatgaagataagccatggctagcaaagcgaagcactgaccactcccctcccctaagagtacagaccccagcacagactcgttcagcttcagttattgtgggtgaagtggaacacccacaaaaataacgtgtcaaaggagcatggccgggattgtggacagtctggaacaaggtggaggatggttttctttttaaagctgggagtatttggtgttggtgtttggggctcagcaaatggtacaactccactaactgagcagcttcagaaccacgtaggcagagtggagagccagacagacagctgaagatcaaaatacacacagtgttgctgagcaaggcaaacttgagaccatgacccaagtccactagacaactggctactctgacatgccctgccctggtgacctccaatgtaagagcccagcaagggaacttggaatcttccaggcagagtcttgcacagagcaagccattgctgctctctgagggctgaagccaggccaagaaatctctacgggagaccaaccacagcaaggcaaaagagggagagggtccttaccagatcactcattcggggccacatcccctagaggaaaagtagggttcatggtaacaggatgggccctgggtgctggttaaagatgtttcggtatagaaagaagacaggagagtaactattctggcctctcacatttaggaaggctgctgagaacttggccaccatgcaccttatatatatatgatgcgtcttgttcatccatacattgagtctccaaatatttgtttctaacctgttctgtaccagatgttctccttgggctttgaggaggaagaaaatgaagacttttttcttctctttgaacttacatttttgacctggggagagacagaaaaggcaatgctcatgctaagtagtaaatgagaggctctgctagaaaggggcagttgttaacggggcagcgagagaattgaagggggtgagggaatgtgctattggggctatttgggaaaagaggagtccagagaaggggacagttgggaccaaggccatatggcaactgtgtgcttgagaagacagaggaaacaaaggcaacggtggatgtaccagaatagctgagttccagaggacactaaggctgggtgacacagtgccacaaagccaaagacctcatccatggcagctccggtagctgcggccatttgatcttttttttaaaacatgaatggactgagatgtgtagccgaaatcctcctttgttttaccactgagaatattaataccaaagagagaaaaacaacttgtcagtgaccacaaaataggatcagagcacggagctgggacatagctcccctgtctgtgtctctgtccagagtgctcttcttccatgtctttgctctggatgtcgacttcctatgaagaaggtgactgagcccctctggaagcttcgtacgtaaatggcgggactcttagcacggcttttatggcatgtcagacttctacattgacaataatagaacttctgtcctagtgaaggatgtactgtggggcatcgttgctaacacgtcaaaggttacactagcaaatccagggtgagggaagggagaccactggcctacagtacgatcacaacatcagcattaatgcatcctgttgtgcaagcaagccctgcttcccgggaacctggccctgttgtaaaatgcctgcatctgacaatcggttacccttgaccaccaccttaagagacaagctctggttctttccctcattgtagagcagagggaaccaagctgatgtaattagtccaaatgcatgccacagataagtagctgaaccagcctggaagcctgggctactggcttaagcatctgccttcttgacacgtctgatcgcagacagtggccagacccaaggaagtctgtagcaatggccaggctcaggtaacgcagagcaggtatccatttcctgtgaggtctgcactggggatcagccgctttccttgccttgccttctttcctgggagatactctcttacgactgtccatccaattcaaggacaagaggactttggggtcccctggaagggttctctaggtatatgtctttttcactccctgatgtacactgtaactgagtgaagcatgtagagaaaccggactgtagaaagaagccatcctcagggactgacagactcggcatttaataacctggtaatgatgactaggtgtttgtttaaggcttacccacttgtcttagggttttactgctgtgaacagacaccatgcatgaccaaggcaactcttataagaacaacatttagttgaggctggcttacaggttcagaggtttcagtccagtatgatcaaggcaggaacatggcaacatccaggtaggcatggtacaggctgagctgagagttctacatcttcatctgaaggctggcaggagaatactggcttccaggcagctagggtgagggtcttaaagccctcagagccacgcctactccaacaaggccacacctattccaacagggccacaccttctaatagtgccgctgcctggcggagcatatataaattatcacaccactgcactgggctgtcatgtccaggttttgcatcatttaagccccacagattctgcacataggcttctcagcaccatctagaaatgagaagctgagaaattcaggaaggataacctatttgctcagccacaacatcataaggataagctggatcaaaagcatggatcctggtccagcggtagctaccagtctttgttgagtgagcagcaatgctccaaagagagtctcaaagtccctggaggcaataaatcacaaaagccccctatttccccatcttcctgaaaagaatcgtgaagagccttaacaagttccttgcagtatctacttagaataaaaagatatcaaagaagccagtctttagggttggctctctactcaaaagattgttttcattttctgggaactggctggctgcatctgttgtactaagtcaggttgtcaagggattgacatgcattggccaggtttaggagtttgtgttgatattatggctgtgaaaaagcacatattggtccccaccatctatatgactgtgactgatttctttttcctctttctctcccattccatgcaacttttgctcacagcctcgttggcataattgacacattggctcaggccgccaagattgccaacttggagtcttggattagttaaatcagttatgacagatgtgattatttacaagaaaatagaagtcactataattagaccttctgaagagtacatttggatagagaacgagaagcatgctttaatctggcacaaggtgtttggtttcagccctaagcaggttcttctctattctgttaaaggaggtgtcggtgtgtctgccactctcttccagactgccatctatcagttctgtgtcacagctcctgagagatggaagaggcaggtggccaagcgagcatctagggcaccaggagatgtggcttcggttcttgctttcagcactcatcctcagcaacagttgattttgtcagtcattaaagcaggttttaaatagaggccctgcctcattataggcctgaaaaactaagggtagctaagaaggagagtgcctggtgatcgctgggctctttttgcacgtaccattcaagcacggccttcatcctccactttctcatcataaactacaggcacagccatctcaagtcagggatgagagttacaggaaatgcaggatgcaaaggcagctttccagccatcaatgctgtctcatgcttcatagctcccattactatatttataaatgcccattttagttgtatagattatacacattctaggctgggcattctagaaggtagccaactcctctgttcagcacagcaacaccatgcctgtggcctgtgatattttcaaacccccaaagaacatttaattttgtttcttatagaatcaggaagaaagcaaagaatacaagaacaaatctaaaatcaagtatcaaaaaaacaggactaagcatcataattatatcaacctggattgtatctatctatgttacgatgcaattataacacagaatttatgtttattacttatttcatcagtgaaaaattatttactaatattatttatgtgtggaggaagagaccatgaaaagcagaactgaaaagcagggctcgtgttaagtcaccatgcagccttggatgtgggagctttataaacattgattcaattgttggtatgaaggcctagtaactctcactctccaagtgagaaaaatccaagttgagaggctaagaaacttctccaaagctactcagttacttagagatgatacaacattgggttaataactgtggtgacccaaaagataaaatgactcaacacattaagacattgtttcttgcttataccaccaatctggtgtgtttaactttcagcccacagttattcgggagacagcaccatctttcttgtagccctgcctccctctggtttacagagctctcacagtttggtggtggatggggaaactatgagaaccaaatttcaattattagtcaagtcagttagaattgaccacatcactctatttggatatcactggccagaaagcagttacaaagtcatatctgactgcaagggaggctgggaaatgtagtcaggaaaccagagactgagaggttcaagcaagtccatgaagtcagctaggcctcccacgcacagcatccatgttcttccggctttcctgagctgcagttctcacgctcagctccccgctgcccacagtcttatgtcctcacgcactgttctcagcaccagccttctcccatgtggcatggtttccatgtgaggcaacaggaagacaactgcatttggggagtttctctgatagctcaggaaggcttaactcggcgtcctgttttctatgacccctgaccccaggcccacagtggcaccactggaaggatgtagaaaatggtggtggcctcttcagtatgggacacagaagtgtacagagagttttagagaactgagagaatcgggctagaggcattctcttgactggacctagagcaccatcaggcagcagcgtaaagcaggagctactgatggtccaccaatgcaaaagctctacagccatgggattctagccctttgccagaagtaaactgtgtgtctcaccccttgctttgcagtgaatacctcaactgagcatctgccatcctcagagataaagccactgcaccagctagaggctagataccttacggactcctcccctgtaactgctgggcaggcccaacaaccttggcaagaaccttgtattaaaggcccttaactcctctagatcgtgtcaaaactgtttgtttagagaccctcaaacaggcatgtttctcattccccaagaagccttcatacagtactcggccctcagtagtccccacctctccagatcccagagtacttgctgacatcctgtctaaagggcctgcttcaccttgcaacatctcattaccctcttcttattcactgcttggcttacaagtataaatccaggaccatgggtgaagctataagagccagtggctttcccaagcattctacagagaccctatactagctgtcttagggtttctattgctgtgacaaagtaccatgaccaaagagacggttgtatttggcccacacttccagatcatagctcatcattgtaggaagtgaagacaggaactcaagcagggctggtacctggaggcaggagctgatgcagaggccatggagggatgctgcttactggctcacatcacatggcttgctcagcctgctttcttatagaacccagaaccaccaactagtagtggtaccacccaccatgttctgggccctcccccactgatcgctaattgaaatatgccttacagctggatctcatggaggcattgcctcaagtgaggctcctcctctctgatggctcaagcttgtgtcaagttgacatacaaaagcagccagtacactaaccaacatcaaatcagttcatccagattcacatccaggtcttggcttgttgtaaggagaaaactgattccaggttaccatctgtttggtacctgcccttcattttggcgatggaaaaggtaccctaagaggaggaaaagaggggaagggcgttacttacagttatctgaaatatttacagccccacacacccttcatctctgtacggtgactagtcacattggatacccatgtctgtgtcctgtgtccaaattagtcagacttccatcaggccttgtcacgtgacctcattgtcattgagaagacacttggcaaggggagcttccctccaggccctgcttggccttcatggaagtccaaagctgtgctttaaaaatatgtctcacgaagaaacttgacatctaggactagccctgtgagggacccctccatgtttctacatcagatcctgcctccaagttcctgccctatttttgtttttcaatgatgaggacatttgcatgaatcaagatcttcattgcttaggtttcagccacctcattgttgtcttcgacatagtcatcgtggttatcatcatcatcagagtcaatgttgttgctgctgttgctggctgttgctggctgctgctttgtgcagctgacacaccattctcaaatttgtcacaggcaacaaaggaactctggagcacatggtcactatttaagggtttcagggtccacctggtctagagagttaagtgtctgtgtacaagtgaagagagctcaaagatagaaggtgtgcacaaccagaaatgccattgcatgatgggagatttcttcagttgacctagttggttccaggtgctggaggagggggtgtaggagaggaatggacacagaagacatggtctcgacatgcgaggaccttaagaggcctctgaacaagcaaggtgccagagcctgacaagatacaatgactgcatacaaataacaaagacagcacatgtgaatgacaagacccagacctgtggtccacaggaaggtttcactgatagaggctggacacacctgggacctgctctttgcttccctttcatttcttacaagctaatatccagactgcagagaaaggagtacatgaggatgctcttagatggttgacacagagtaagcaccgcattggtccaagcctgttcttagtattcacaggctaactcctccccatctgaaggaagagatagccaaatggccacaggaaactttctagaggaaggatttgaactaggcttgaggatgtagctctatgggtagaatgcttgccgagtgtgtgaaaggctgaggtttgaccccaggagtgcataaaccaggcatggtagcaaacacctgtaacccactcagagatggaggttcagggttatccttggctacacacagggagttcaaccagcctggactaaagactgtccagaaaaaggtaaataaaataaaaagactcaagtttgagctgagataagaagaaacatgaccggagacctataaaagtgtcgccatctgagccttcaggctaggacactcctgtgtgtagagcagacatgagcaggcagagtgagcactgtgctagatcgggccttgtctgttttccggcttggcttccagatgtcagtgaggtgtctgcatcccaccctcccagaaggccagctaacttttcttctggtgcccttaatgcatgctaatgcaagctgagagccagcaggaagtatctatttccccaccatcctatagctctgctttggctggctctgctctccctcctgtccagggcatctttaaatcccattttcacagcccttaggggttggcaaggctgccatagacctcagtcacatcacggtggaaacaattgaaaatcacttggcaaaaagaagggggtgacctaatgttttagagcaggattcattttacacacacacacacacacacacacacacacacacacacacacacacacacacacctcaccacctgagacaaaacaattgctctaccggcccaatgccccagggtcccctagcatgctgcctcagagaggacgtctgtagagcgacccgggtgggcagaacagtctagagctgtggagctggctttgcctcctggtttgccagggttcctagggcctctcagaggcaaggatgtggcacagaggcctgtggaaaggcccatatatagagccaggggaatgtgggcctctggcaggtggcctggaataaatggccatgttctgagggtgaacacagccctattataaatagcacctgcctccctccccttccagcttgccgtgtcgatcactggatggttaaagttaaggagactgagcagggcaacgaagaaggagaagggagatgctgagggccaggatgtgtgtgctacctgtgcctccaccgggtgcaggaaaagtccagcttagagagttgcttatgtcctttgtctaggcaatgaggctcaaatttacagccatggctttgggactggattcatgtgttcactctccattcttgtctttgcaatgctcattgttcttatccttgagagcaatataaacacacacacacacacacacacacacacacacggagggccaggcagggtggtgtccacctttgatcccagccctcggaaggcagaggcaggcatgtgcgcgggtgtgagcatgtagctagggtagctagactcggcgccatgttcgtaatgaccatctatagcaatggcaatgtgcctcaaggatctgagctacacggaggaggttcagaggccactgcagaaagagaccttccaaaccttcaccccccatgtgcaaaagaacagctttactctgacttaagtactagattgcaccagttgaaaagtggatttcatgccttaaaagagaaaagcaaaaccaatattgtacttggtgttctcatgttcgtgctgagtcaatgaaagtccaaagaaggaggagcctgtaccagcctgactggtctgaggtacctgggggttttgttcggtaaagggtgatcctggaaggtaggggacagaagggtcctagaaacaccctttctatccctatccttcagtgaacgaggtcagaggagcaatggggcttgtttcagtactagaactgccagacctagggcttgaggccctactaagtgtttagccagagatgtgagatgctgtaaagactcagaatggcaggatttgtcccatggagctgtgtggcagagggagaggcacgagctgagctgaacaaatgcctggtaatgagataatgcaaagggcagggagagcaatgctcacatctctctcgctcctgagaaacagaggcctagggaagacagcagcgcctgtggcacagcctctgcccatcaaactccacaacagctcctccctaaagggatgtgtgatacacgctggtgtcctcaccaccctccaggagagcccaggccccaagcttctggagtggccttcctgcaagacagagccctgcggctttgaggctgctcagcacagggaaggggggggggggtgttcattctgctgtgcctgagcagagccctcaggagggaggctggaaggcttctgctgcaggacctgaatgcataatgtgccttgagcaaactgagctgtgcagaaacccagacagtctcctctgcccaggaaagaacatggcttggacaggtggcttgccctctgcagcttcctccccaaccccactccccgcgtatacctcagggagaactttaacaactttctaaaacgtacttttcatgaatccagggttcatgaaccagctggggtcccagactttatttcctggtctttggatataatatgcattccttacatgagactgaaggaagatatggatgggtaaagattttcataaaagtagaccttgatcatcatatctcagacacatttagaaaataagtacgcaatctttacagtctattgtgctagtctaatccctggccttagacttcactgccagacactcggaaagctaactcgggctcacctgatctgatcggacagtttctcttctagcttctcaaacctcacagaacgtaaagaaatccagggccgtcaccgagtgtatgcacagtgctttatcaaccctgagattgatccgagacatccgtacacctcattttctaatgtgtacatggagaggtgactcttgcttgagacatctgaccttgcatttgtcagtcccggagtctccatcccagcctgagatggagcaatggagcaattatatggagtaattataaagacaccaccttccttcttcaactctgcacactagcctttctaagtgaagtgagcagagtcctgcaagctctgtaatgtgacaaggggattcctcctgtgagcctaagacaagggggcttcctaatccctttggttttggaaatgggacttgttggggtgcaggtgtcaatggctgtgggaggtgagacatctctgccctcttcgtcagctcttccatgtttttacatcatgatacggttgagttctttactgttgtgttaccttccatcccactctcttaatccaaaagagaacttaatcatggattctaggggccgggactagcgtatcggagggatggaaggcctgcatcccatcatgctgtagtctgtggtgatgtacatctttaagcaaatacacagatcctctgtgacccaacacctgctgcaccttactgccattattgcataacttagcatccagtccaggtaggcaccaatttgctcccgagcagggctggccatcttcggtctacccgtcagcacatcgcagacatttaataacctgcaggttattgtgctgctcctcttgctgagacagagatgctctccctcctcgttgctccttgggcattatggaagagagacccccaatgacttccatatttcccatctgccggcatgttaggacgtgattaaatatttaaacactggaacataaaaactgaatctataaaatatttaagtcagtaagtcaaatgttttcatttttagtcattaattatcttatgtggcaatttcatgcaagtacacaatgtattctgattgctcactctccaccccatgtatcttcccttatcccaccatccctaccaaccctccatcctccttgcctgtccctttcccagattcatgactgtgtgtgtgtgtgtgtgtgtgtgtgtgtgtgtgtgtgtgtgtcatttagcttaaccagggccatcagtgtgatagaactatcaaattttgttttttgaaacagtctctcgtgtagcccaggttggcctctaacttaatgtgtgtgtgtgtgtgtgtgtgtgtgtgtgtgtgtgtgtgtgtgtgtgtgaccttgaactcctgatctccctgcttctacttcctgagtcctgggattacaggcaagcacccccatgttcaatttatacaatgctgggaatcaaactaaaacaggcattttatcaactcaactatatctccagaacccaatatattgatagttttatgtttaaaatgctatgtaatagcttggtgctgtgtgctagctcatcacgtgttaatatttcaaatctgttattcagggcactgcataggcagtatagtcccatctccaaactgctacatatagctctccgcagactatgtcatgagcttaaatttagaccctttcatgaataggaaggttggcgaaagactctatcctgatcaacactttgcctccaggcttctggcccctgtgagagactccatgtagaataaaggctgaagaaagacccgatggcgcctgccaggaattttggcacctgggaggtagaggtgggagaatcagttcataaggccaagagagaaagagagagaggcttgggggagggaaggggacatactcagagaggggcagggagaaagagactcttgaaatatacagtctaggtcagaccttgtgcaagtcacatctgaacttgagccacgtgcactcacctgtcagctaggggcttagactccttaacctctggttcctctttctgcagcagcttgtcttagttggtgctgccaagcagaacactacagacatttgcctctcaccctcctggcaactgactggattaggtccaagatcaaggtgccggcagattccgtttctgcagagggcccccttcttggcttgcagatggctcccacccatgtgtccctaagtggtggggacagagtctgttctccctttctctcctcggggctgtcatcccatgaagatggcgccaccctcatgaccccatataaacctagcaatgtcccaaagcacccttgcttcttcagcatggggactggggattagcagtttgaacaagcactggcccaaaacaggtctgtgacaattctgccatctggtttctggtaggcaccattctgctgtagccagagcaaccgtttcgcttccagcctcagctcatgactacatcagtgtctctctggtgacagccaccctggcaggttcctcctaccctccctgtccttctcagaatccagaaggaaaactgcctttcctgcctgtcaggttggagcttgggccgcaggttttccaactgtcccctaatatattcaccattccacaccaaacagaaggagtttggtttcttactctagtgaatgccgactttaaaaaaaaaaatctggtggcttagggaaaggaaatagaattaaaaaaaaaaagaaaacccacacatgaatcgttgcagacagtctatgttgaagtgtcatgtgcaattctgcattctattttataataaaaatacattttaaaagtcacaaacaaaactgggtaaaccaaggaccaggtcctaagctaagagacctgcatctctctcttaaattcttccaggtttctcttgctccatcctttacttctttttaagatcccttgttcaccttgccttccagcatctaaagtcagggcatttgtgcatccattggcttacccatttatcaggtggttgtggcagttttactgcgatacttatggtacctgtatccctacatcgccttggtaacaacacacagtgggatgtagcccagagcacaggcccagtgtctatcagagcaccaaattcaagcatgaactcaaagtcttaatctcagcctcacacctgtaacttacaaagaaagaggcacgaggccaggcttgcagaccagtgcctggaataaaggagacagagattaagtaagagagaggacggtggatttagcagtgaggatgccagactaaatggtccatttgccactgaatcccagccagtggttctgagatctcatgagctctgggatgctagctagtcctttcttactcttttgaggaaaagaaatcaagaaactcttggtttctcagagatatatccaaaatacttaaaacatgatgtaggtggaagaaaatgcatctgaaagcccaaactagcttcaagcaaacaattcacaggtgttgggcctaagactccatagggtgcatagggctttcctccgagaagcaagcgttcgaccatgctgggccttagccttgaacctgggtgtacctctcgcactgccactgaagcttgtattaatgctaagctcttaggagtccttgggagatggtagttgcttgataattataaatgactatacccacacatctaaatgttactgccccccctctcagggctcgtcctggggtcctgcacgtacaacttaggacccagcaatgtatacttgttatgtaacccaaagatgcgacttccattttggcattggttattaaatgagtataagaggctcagggcttggggcaaatagatgtaatatttggtaatgaactgatgtcccaagacctccgagagagccccccctcgggctgtgatttatcttcctcttaatgcaggtaagagaaatggagctttgcaaagaactggactgcaccatttgtcaaaagctgcgccgaaccagtccttttggcctaaattaatttactcctccgtgctatgaatttctccttcccactctctctgtttcctctcgcattgtgtctttcttgctgggagggaggagttcacactaactgaagggcacatctcacttaccaggggccggactggggccgggtagccaagaagcccattatttctgaatctgcaactttctaagggcgttcgcaccttctgcagctgaaggagtacaaaggaactcttgagccggggtggcatcagccctattttcttccctggagggaaaatggaccattattctcgcagtgcccatttcccaccagccttccatttaacttccatcggagagaggccccagcttcttgcaggtttcactgctggacactccaacaacatattagcatattttgcatttaaaaagaggcttgaaaaatgaatccaatgattggcatggtgtttcaaaaggacttcccaaactactagtaattgtgtggttttaaaattcaccactcctgcctgaaatgccctgtgtctggcagccagcttaatcaggagaaacttgcaccaggcgggggccatatttccaggcccatgatacccagtgattgcctgctcagtacctggagactcactaaagagaaccttaccccagttttttcagcaaagctcgcagtttgttcttcttccttacgcggcagagatttacaccagtgaaagcttctacttggggggacaatttgggaagcagagggggaccagcaggaggaggagaggggaccaaagagggtagcagagggaatgagcatgctcaaagcacttgatattcattcgtgaaacccattattttgtacgatgaatggaaatatttgaaaggcccttcttcagagagtctgctcagccttctagactctgccgaggtgccaggcggtgtagccaggattggaatgttggttggcacaaatgactgagatgttgtgtgagagacaggtgctgagacccatgcttgttcacagagcatggctctgttctggtccagggggctttgctatagtacgacaatttttgaaatggaagtttctagaacgatcttatggaactgctgtctggggtccaactttcacttataggaaaggaaagagaacccagaaagatggttacaagatcagggtcattgctgttttgctctttcatgaaggtaaaattttgatccccaattctcagtagagattaatcttacaagtctttaaagaacattcagccagaaataagagcctgggatgcacagaagacagaggtctgaagaggagacacttagaacccggcaagctgtgctttgtagaaaaacaggggaccgtgacaaatatattaacgaacacagtaatagtgacgatgattgcgaacgtctgtgagctttctccatgccaggttcagtgtgtggattatctcacttcatttttacaagtctgtacagcaaggtagatgcgtgctaaccatgcccagtcggagcatctaaactcagaaatgcttcaaagtcctgacatgactccacaagtagaaaaatcccacaccacaaaagattgctccatgcatacagtggtttaaaatgttctatgaattatctttaggctacatatatgaagtatatataaagcatggatgaatttcatctttcgacttaaggtccatcctcaagatgtcttactatatctataaaaacatgtcaaaattcaaaacacattggattccaagcgtaggggataccttgactgcactaatacagtcctgttccatgcttgattacccggatctggcagactttggaactggaatcttgaatgagaacgaaggagcagatctgtaggtagatggcgaagaaattggggtttccaggccagtgatcgctggaaaagaatgtcagccaaacagatgagaagacaaggaaggaaacagccagaagatgaacaagagggtgcctgggacctggggagcagagaggtgggggggaggggttgcggtggttgctgtcaaaggcacctgtaggaaatggacaagtggcaaccaggaaagcaaaagagtacaagtacccacatgagctcagaagaggagtgagctacattcccattttctttaaactagaggggggggggagagggagagggggagnnnnnnnnnnnnnnnnnnnnggaggggagaagagaggatgtttataatggggagaaggagcagcagggggacacatatacccaggagaggtgtggggtgacaggtcctcaccccagtggtgtcatgtgcaataggaggaagggacttgatgagaagagactctgctgggtgaggactagagaccatgagtgacccatgactgaagaacaagcaggaggtttagcccaccttctttgactggagagtctcaggatgcttccctcaggccatgggagctttggctgacagtctgatagtggagtactgtgctgcatagtctgcaggggcttccctccctgcctggagcctgtgagggctggctgtgggttgtgcttactgagaggacactgggctgtgtctgggccttgtgagccggtagtcacttttcagtgcccaggatctggcagatgataactgctcatctacaattcaattggagggtggtgatctttttgaaaagtcattaaaacaccatattttgccaaaaatagtatttgaagaaatcctttgcttgactctgagtcacagattaaaaggaatctaaatagctatgttagtaataatggatgtaaggatagaggccctcctggtttataactatattaataataatggatataagaatagatgctctcataggttttaggcaaaacaaagaatacacagtctttcatggtggtacacacctataatcccagcacatagactgaggcaggaggatgctagttcaaggattgtacaagacccagtcccaaaacaggggcagatgtgtaacctgtatgtctccttgtccttacaatgttttgagccatcttctaaataagtgcaaagtcagaggtgtgaagcagtcacaagggagagactgagccaagcttcgtcttgcataggcctcttcctctttcatgaccgctattctaatctgcacagtgagttttctcaagtcaggagttctagtactgtcacaggaatttgtttttgtatctcgtctctaccctgtgactttgcctctacatctacaaatccaaaataatgtgtttgtagctaccaatgttcatttaagcccagcctgtcaccttttacccttaaagacattcaagaaattaccatagtggctaaaaagttggttggggacaaaaaaaaaatagatcacgttatgtctatgcttttcacatttaatattccttttataggaacatatgcgtgtatccatctatattaattagcagggaaaagagttggctcagtggttaaaagcattggtggctcttccagaggacttgagttcgctttccagcgcccacatggcagctcagaactgtaactccagttccagggcatccaacaccctcatacagacatacatgcaagcaaaacaccaatgcacataaaataaaaataaatgagtttttttttaagagcattatgaatactctcctacctcatgggaagagctgggaaagaaagtgcacaggcctcataaagacctggctgcccatcgaggacagagatcagatgaacaagcaaatccccaggacaaacctgcaaagccggagcctgggctcagagcactctgggattctgtttgtttgagaaaaggccttgcaatgaatgtatcccaggatgacttcaaactctaaagatgactgctccagccatctctcccaagtgtggctgtcaggattgcacactgaaaactgtgacttcggcatgccagagatgtgaagaaaatagatgcaattcatcttggtggcctttgtgacatcagagcggcactcgatgtaggcatggccctgcgctggtagaaggaaagacagggacatattgtgaagaagaatttgcctggtgataaggacgtgtgtttgtcactagccaaagagactctgatcctgccatgtgaggcctacagcatgtgcaggctctgcctcgggagtttccacaggaaaccgcatctaagcacctgtcacagacccctttcatctctccctccatcccagaaatcctggtgctggcaaagttgtttaacaagctagctcactgccatcccagtacctttcaagcggtagccctcatttccaaagcagggagtcctggtctctccatttgcacttcgtgatcagagcccaccagggtaggatggaagcaaggtaattttacagattcctggttggtttcagagttgtagaaagtgagatccgagcaatgtgtttcagaagtgccagcaaattagagccacatctcagtccctagggtggtcactgagtaaacagcttgatttccatccatgctggagggacagaaagcagctctcacagttaccgggagataaacgtctccatctctgctggtgcaaaatggcttttagtacagttggccctgggagaagggagctgacttactcctttgggacataatggaaaaagagagacagttctgcttggggcagaccctgtcctcacattaccaagccacagcccttccaaacccccattgggctaattcaggtaaagggaggcagaggcctgtcacagagcaccatgggagagcagatagatttgcattcctagccacaccagcaaaacacgccagactgcaggaggcaggaaagagccccgctgcataaacaaatagctggagaaaccgggacgatctggctgggatgtcagagacttcaagttagggcacactggttagcttccgctcatggaggggaaaacgtcttaccattccactatgcagctctggagtttatcattatatctccaaaaagaagtgactctgtctgcagggaggtggaggcaggaggatcagaagttcaaggtcctctttggctacctctcaggttcaaggtccatttgtatacctcgtgggactctgccttggaagcagcaccaggcaagtctatcccagcaatattttattcagcagaaagctgggaagaggaaagtgatgtcaactaagagatggattgtaagacaatttgaaaattacagaaactaatgattaggaatgtggcagaaacctttaagttttccagtaagcttgtttaggatgaaaggagaaaaacccagttaaatgctaaatacagatgcagaatactacatacggaatatcattttataaaaataggtgtgaaccaaattgcagcaaaatgtggaaatactttaaatccttgcacgtaacatcagaaaagattctttcaattctgaatttattatgaatggtaagttgcatgtacatgtgtgcatgcgtgtgtgcgtgtgcgtgtgcgtgtgcgtgtgcgtgtgcgtgtgcgtgtgtgtgtgtgtgtgtgttgaaacagaacatcatcatacaccttttgctttctctccgtttcttctttatttttgtctgggtacacacacattcagggaaagcataggtgctttgttcattcaggagtttcctggccaatggggacctgagcaggctacagagacctggacatcactcatctctctcccccacccagtcactgcccactcatccccatccctgagccatccacactttcttcggcttgtttatatttttagctctcaggcccaacgagttccatgtgttttccacacccagtgcaaagtggcagaggcctgcccagctcgtgtcctcgtgtggcctcctttggacttcgaggggtccttcctgcttactacacagagggacaaaaataagtctggcagtgacctgttcccattagcaaagcacacacacacactgattttttaggattgtagggcttcgtgtcagagagacctaagactctttagactgatgttttcctaaaaccccacatgactttccagaaaccagtggcaactgtaaaagatgcaaggttatgtggctctgacaacttaaaatgtcacaggctcgtggcaggcagaagaactgtcttggttttgttctgggctagaataagataacagtagttagcttgttcagctcacaaactccagtctttgtgtttggctatacatgtgttgggccgttttgtcaatggggaagttaactgatgtatgagagacatgatcttttaaaatgtggattgtccaaactgtggacatcgacagaaccatgcttatctggtccatgcatgtgttgggaagaaggaagaatgctctaaacctgcctaagtagatgatacaatggacccagagcagctgcctgctcccactgaaaaaactgctacatgggccaattggtctagagttaggttgtccaaagctaacaccttagtgtctatggggcttcgcctactgggatgtgtttcctgaactgggaatagtctggcaatcgatgaatctgtgtttccttcagcttcctttcccaaatgccttcagcatggcaaatggctgctggcgccaattgtctttcctctatccctccatctttcccaactggaaacacagaactgtctgcacagcaatgtgcaaaggaaatcggtaggctttaaagctgatggcctatgttcaaatccagcctccctccctccccaccaacagtccacggtcccagggttaacttctctgcccatctgtttctccagtttcaaatgggaataatgatagcatttgcctcaaaaaggcctttgtgaggagcaatcaactccatgaatggaaagcatttgtcaagaacataataaacatgcgcagtgacgggcttcacggtctcggatgctactgacagttttcatagaaagtcaatgaccaagccataggatcagctttggatgcgctttgctttgctgggccagtggtggccagctcctgcctgtgctgttggctttatctttagggaagaactgaaaactgcccatccctagtctctcagaacctttccaagggttccaaagccatcatagatcttcagggctactagtcagctctgccactggagtgaaatactgcagatggttaacctatggagagaaaaaggtggctcacggtttgggggcttctagtttaagaactatgcctttgggcctctgatggacatgccggcggtggtgataacggaagcattggtcaagatgaactacatagctcatggttggggagtaaaggatgagagaattctcattcagtggtcctcttcagtggtatataagtgacctaaggccctccctataagctcttccatacaactccagaacacgtcccatcacgtgtggtacaatggatggatacatactgagctttgggccacaggggacagtcaacatccagactagaacaaaggcagagtgccaatgtcctgtctacttgcccaggagtcttcactccccaggctctggtatctctagatacctcttctgacgcttcacaccaggatagagggagggacgggaagaactaataccagaagagccttgtcttggtcatcagcatgtgctgtacaccctgcacttagtctctggttgagcagcatagggtcctgcagatggctcctgcctccttcctatggctcctcctgctgtctccactgactgttctctgcaggaaaccatgagccaggcagaccggttgacactgggtcccagcattctggaagacatgattgtttctccaggaggctgtcctaggaatccctgatgtatttgctccccaggaacccgttccaggtcctccctctctgaaaccaccatttcctgagcactctctggaggtgccagacctcctgaggatacaaatgcaactccactttctacctgtggactgctcagtccagcaggagctacaaaggaaacacaaaagggatgcttgcatagcctaggtatgggatgagcacaaaagggatgcttgcatagcctgggtatgggatgagcacaaaagggatgcttgcatagcctgggtattgggatgagagtggcccttcaggcccagggttccctgaacagggtcagagttcacaccgggtatatggccaagctccagtgtctctgagtgtgcttatcgctctggctatattacagatggttctggcaggtgtcatcacgcagcctcagtttctgcattccgggagggctgatggatagcatgggacccacctccttgtatatgatcgcatttgacctaatccagcagctctgtaagggcaaacattacacccattttacacttcctgatgccctgaggggtgagccaaccttgccctgttatgtgagggcagataccaagcccatccaggtgtctaggaaatgtatatatgcacaatgctgggctgcagagccagatcttggagacgccaagcaggtggcaaatccctggctctctaatcctagctctgcctggtgtgtgtcatacagacttagaaaagccattttttttcttgagaactctgtttccctagctggcaagtgaagacattggaggagagattccatgccacagctctatagaactgaggctgagaacaccttagtacttcagtctgaggtctctgtccttgtcctcaaaccccaccccaccacctcctgctttgggtcccttctttctttcttccagtaaactcaatgtgtgcgcaacagttatctggggagcttgttacgtcttggccactaccccagaacctattgactctgcatagcccacaagagagaacccggtcacttgccttctgtcttacatacaccacaggattcctgatgaccaaagtccagtagttctcagattccagtgtgcatctctctcacttgggccttgtcatagggcagagcctaccctcagaatttctgcttccatggtcaggggtgagtctaccagtcttgatgcttctaccaagttctcacataaagtggggtcactctgagagggtcactgtctcagctcattccctgcaaacccaagtagcaagtgagtggtgggatcctgattcccaggcagctgtgcatgaacttttaaagaggaaccttctaaactactacagtagggctgggagctggctcagtgtgtcgggtatgtgttgtgcaaatacaagagcccaagttcagatctgcaacactaacagaatgtgggcatgggagtgtgtgcctgtaaccacaaaggcggaggcagatctcacttctaagacctttccaattctgctatagccttaacttgcattcattctgcaacccatatagatatagatatgtctgctgtgtgccatgtgaagcatttatcagagtgaatgttcttaagtaatgttagaataaagaacttacattagcttgatcagggtaccaagataggtggatttcgtgataattgccctcgctgatgcctctaaatgttgtgaatttactgttatttaataatttctgacactgtggaaagacacacacaccaagatggggagcaaataggagatactaaatgttgaacagtggcctctatatgcacacacgtggataagcacatatgcacacatacatgtggacacatatatacaacacacacaaacatacacagaccaaataaaagtactgaaataattacaaatatgactattgtttacctctgaccctatctacaagaccctattactactatatcatcaacagttctcattgttactcaggacttaaagattcacaagtcaaaggtcaaggagaataagtagtcacacaagattatacacatcacagatgcagtaagaatctcctaaacacagtctgggatgtttttcatagtctaccagacctctctttgcctaagttagggatattctatcgtgagacttgtaataagatttagaaagaagtcctcagggtggagtgatgtttctgatttgaagaaccttccattggttcaccgaaaatcagtagtggcctttgaccccatggtaggacagcattgattgataactcactatgtaagccactatgaatggatccctggtccaagggactgtcgggaagatgggtaggtaatacatccccagcctacctgcttagatgtgaaagccaatggtggccagatcaagggaaccccctggccttgagacattccagcctgactggtggtctgtttgcctataagggacttgggaaaggagttcttggcacctgaaaacacttgcccagttgatgtggaggagtttggatcataatctagtggcatgcatcttatgggggagtttctcattccctgatttgtgagaattcatattaagaggaactgcattgatttgtaaagatccagagtaatgggagagaaaattacatcctctttacacattctctctctctctctctctctctctctctctctcacacacacacacacacacacacacacacacacacacacacacacacattcacacattgctacttacagttttcacatctggctggaacctccgtcatctaaagtgcctatgtcttttgtagcgctctctctctctctccctccctccccnnnnnnnnnnnnnnnnnnnnnnnnnnnnnnnnnnnnnnnnnnnnnnnnnnnnnnnnnnnnnnnnnnnnnnnnnnnnnnnnnnnnnnnnnnnnnnnnnnnnnnnnnnnnnnnnnnnnnnnnnnnnnnnnnnnnnnnnnnnnnnnnnnnnnnnnnnnnnnnnnnnnnnnnnnnnnnnnnnnnnnncctcctcctcctcctcctccttcttcttcttctcaatctctctctctccctccgttctctctctctctctctctctctctctctctctctctctctctctctctctctctctctctcccctgctgtctgcaaggaatagtcatgaaagaagaaggacatgcctttccagccacgagcctctgagccagtgggagccctttacacagtggcttctgagtgttcattatctttctggttttaatcataggcttacattggtcctagatgggttgtgcccatttcttggaaggcagcttgatagaattgttgccgttgaaattggcattgaaagtcatggctatatcaccttctccaagagcctctagatgcaaaggggtgcattaaaaagctcactcctgcagccagccacccttttgtaatctgagcactcaggctgaggtaggaccatctggaactcagtcatataatgagtttgaggttagcctgggctcaacaacaacaaataaacacagcaaacagaggacaattagaatacagtgtctcaccagcactatgaccttgggtgagtcacttaatctctctgtgctctgactttctcacctcaagaagtgctcaatacaaggactgagggtaagttatcaggtgctgttgaagataccagagaggacactaaagagcatacttttgttattaccttgagggaatgacctggctgataatttaaggatctcattaggcccccagtaacctatgagggctgtgttctagaactgcttttacttctactcccctggaagaacaaacattgcctggggtccaagcagcgcaaaccagaacttttgcaacaatgttgatactgtcatggtaatcatcaatagtatcctgctcggagaaaagctgagaaaattgcaatacaatacaagaaccctggagtgattgagagggataaaatacaaaagtacaattttaagccggagcagaaaaattcaatggtagggtgcttgcttctctaacgaccaggtcccagttccctgaacggagcagcaacagcaacaacaacaaaagcccaattacacagtctagtcctgctctcagtctgccagcctaggggcgggattattctgcccatctaggattctgagctagacagacagacagacagacagacagacagacagacagacagacagataggagcctcgggctggaccttataggactgtgggatgagtcctatattcaatgagagccttcacaggtttcagagagtgttgtgtctgatctccattttgagatgactattatgggggagggagctgggggcggggaacagggaggatagctgaagaggaaccacagaaggggagatgaggtgaggggtgtggaggggacgacccttcagggggctgctgtggacatgcatgccagagatgacagcaacgctgatggagagagccctgagtggatttgggcggaaggcgagaagcagtccttccggtgggttggatgaatatcgttggcaaggaggagagccacagaggcttctgggtgccaagttgggaggtggtgggagtcttgagaagagcagccttagaggagagtcagacattcctgggagttctgtaggaagcagccgtgtaagcactgaacccgcacgtgggcacttgtttcctcagggaagagtgcgccccattctctggcttctctggagcatgcgggtcactggcctgctcctggcgtgcaatcaatgccttcggtgaggctctcaagcccagccccctctcactctgtctgtgaggattccttccatcggctttgagaagccctgtgttccttctgtcgccagggagtaattaataacccctctcagaatgctgggcctggaaccaaaaccaaacaaaagccccgatgtcctcctaccttctaatgttacggcctttgggtaacttttttcttgtgccagtcttaagggatctttccactgctgacgcttgaaagtggattttttttttttgatattgtacgtaggcctcaaataacctttgccttgtgatggcttctgtctagatggaacccagtaaaatttacagtaatgtcaacacggatcacaagggttcagagttccattccacccaaaggcccaactgattcatgtgacttgatcttaagagcacctcagaggggtgggaaaatgagtgtcacctgaagtcagaggctgtggtagacaagagcatgtaggttgatgcttttaaaatccgacagcggagtaaattagaattgtgccacacagggcacaggagcagggccaaggatgtgaatttagatgctgcggccagtgtgggtagtttcttgagaagagctgaaggcagagcaaggccgaaagccataaccagtagcctggtccattccaagctattcacactccacagcattctcagatgccgcttgcaaaaggaatctgtggttcaaaaggatgctggataggacagggttaggtccttctgtgccccactccaccttaaaatgaacaccctctccccttgtgtatttgcctgccccaaaaatggacttgcagcctgtgatctttctgagtctgctctagcctacctgcctggggtttcagacatcccctgcatccactatgctcaccgatattctttgaggtgagcttccggccccattttatgctttcttttctgagcctacacccttccttaccttatgctagtgggtttctgtagttcagagccagaccatggaggcaagtgcatggttttcaactccaggttgctctcagacgggagtcttggctcctctgttggttgttagggtcagaggccttgtcttaaagctccattttctctgtggccatgtgtttggctcaggacatattacacatctgacttctgaaaaagaatgaaaagaacttagtacccacccggcaaatggcccctatgcttgtcctcagaggagccgcattctattctaaaggtggaccagtcctcagaatgtttgcgcacctccattcctgacactattcgctctggtaccagccaccctctgccctcggaaggtgaccccacttgtcacatctaaggacaaaagtgggattgtccccactagtagctatgtgggggggagatggatgtcaaaacactgaacaaattattcagctcaaattattcagaaacatccctttgcctcctaactccaactttgttccctgaagacagctttgagggcttagcttcacacggtcacctcactgagggacctatgaacgctctgccacaggcgaccctttgagacaaggcttctctgtgagcatgcttcaaatttgtcctctgcacattttgaggaacaaataactcagtgaaagctcaggatgtggtggccacagtgtggccttgagaagcagtgtgtgtgtgtgtgtgtgtgtgtgtgtgtgtgtgtgtgtctgtgtctgtgtgtctgtgtctgtgtctgtgtgtctgtgtgtgtgtgtctttgtgtgtctgtgtgtgtgtctttctgtgtctgtgtgtctttgtgtgtctgtgtgtgtctttgtgtgtgtatttgtgtgtgcatatatatatatgtgtttgtgtgtgtgtatatgtgtgtgtgcatatatgtatgtgtttggtgtgtgtgtgtgtacacgcccatgagagcgcctgcctgcatgtgctcacttctgtgtccctgtgggatagaagcgacagaagcagtctgttgagctagccccaccttgcagagataattccctttatgaaacagcctctggaggaagccactccccttcagctgtccctggaaaaggtggccacgatcaatcccctcttcctgtgctgctgctggccttcccccatgggtctgcaaattccttccagttcagcggctctttccactgaaccgaatttaattattttattctttataactggaacacagcccccatcccatattcttaccgtcaaccccaaattaactaagttgtcctcattaaggatctgcggacatggctgtgtgtgggaagacattcaggtctcattctcaggccctgtgtttgtcttcagtctcatctcttaaaataacggagatttgacagaggctgggtaagcaaggcctgttttccctagtcctggagtgcactaggtctttatcaacctgagacatccttctctcagctatctctgtaggcttctgcctccagaattcagttctgtttcaaagatgggattcgtaatttgaataataggcagtcattggtcgttaagagaaatggcctcccaaggtctcaccactctctgggtctcagtggatggagagacgttttcttcagtggtatagacactggtaaggtgcttgtgttcctgtgggtaacccctcacccaagcttctgcgagcaactctaaagaatcccactgggtcacggaacacaagtatgaaagtagagaggggattatacatatacatatatatatatatatatatacatatatacatatatatgtaattagtataggctaataaaaataagtaataaaaaatacctccctcaaagcagcccttcttgatcactagagggtcagagctactgaaccgctcatgaatctcttccaagtagccatcataactgacatttgatacttatttgcttgttgagttatctgctgttttatctgcatctctaagactctaccaagggaaggagtttgtgttgatagctttggagcccctggcacgtattggaatcgcagtaaatatttcatagctacagaaattattaagggccaggctctggctttgcacgaattacctcatatttcccaatactccgatgatgtcggtgccatgaggtcctcatctatcaaaagctcagagagcaaataaatctcctctgatgaccaactagtaagggttagctacagcttctggaccaactagtattggtccagaacctgctttaacccattgactgccaggaggtagaaacaaaggcatgcgtgtgagagatctgaagatggagacgcacccataggcaagttccaggtcgagggtagctgtgtccagggctctaagcaaacctcctccgctcattcctgtccccttcctgcttagattctaaaacgttggggataatgatctgcattgccttccggggcagggcagtgtgagggggtgagagtcgtcagggaggcagcacttcatagctcagtcaccagcagactatagtggtccaggctgctccaaatgtggcagtgagctgcatgtatgtatcccttatccccagcacagacccgtccatctgtgtgcctacaatggcatattggttggaaacaaatatttcaacatcaggtgacacaaagagctctggactgcactgtcatgatttctcctccatcctatcactagaacacctgtggcagcagataatggtaactctcatttcctaaatcttagctggcatgttcccagcattctttacttataaatagtttccccgggttcctcctgagaaaaattaaccccagttactactacgcacagagatgtccagtaactttgccaagccacagagctgcgatctgatgcagctagacggagaaggcaggcttttcttctgaggacgaatcataaccggctcttattgtgactctcagctttataaatttgggggaatgttcttgatcacacttcccagcctgaaacgcctatgctctttgagactgagaatgcagtgggagttttgagtcattggtgtgaatgaaggaacggagaccgggctgagccaggcacagctggggatactaggcggataggtctgaatcgcagctccctttgatggagtgcttgcttgggtcttgctgtgctacagattgctacttcccttctatctgtggcttgtagagccccgtgcctgcttcccgccgccccccatccacaaacactgctctgtatagaaaaaggaaacccagagtttcttgaccagagcctcacatctttccttcgttcattcacagagccctgtgtatactaccagggttgttagcactttatagacaaggaaacagagaccgggcttagaaatggtggtctgaaggtcacacccctccctacccactatgactctccctagacccagggctttttctatgtcactggaataagcccagccttccgttatcctcaccttctcccacttttgccacacctccatggagttaaagacactatgacaatagctggacttctctaagcgagttcgtgtaccagaaattgtgctgaggactcctcaccaagccccgttgatttcccgccgatcctctctaaacccctttggggtacatagcatttgggtgcccattttatgcagcctcaaaccctcctttatacaaaatcacacagctaagaagtagcaagaccagtcactgggactcctagtcctatagaagaatgtctagattccttggtgtggcattcatacaccacgtgcccactgcttgtgctatgctcccacttggtgtgctggctcctctccttccccaccctctgtcaaccttgctgcggctgctcagtctcatcctccctctggccctgctctctagaactactggctcacaatgctctgctgacacttggctccactcatcttccatgtaccgggcaagcctcaccctctccacacagcctcctctacccaacttctccctcctcatgctgcccagggcaccctctgtagctgtcaacaagtgccacaagcacctgaacacatttcatacatctgagagatctaggacagtgtgggaggaaggcagctagaggcaaaatgacaaagaacgtgacccttcctaagggccttgtgattcctttcttcttgctttgtttgtttgtttgcttgtttgtttgtttgtttgtttgtttttgaggcagggtttctctgtgtagccctggctgtcctgggactcactctgtagaccaggctggcctggaaatcacagagatccatctgcctctgcctcctgagtcctgggattgaaggagtgcaccacaaccacctggccctttttgcctcatagcgccagaccaacaaaacatgtttgctttgttgaaacgtgaaccatgaacagctagtctgagactcctgggggctccctggagcctcatgtcttgtcagtgcttagatgggggaggagggaagctcttcactagcaatttggcatcatagaaattagctttttatgtcattgggtctatgaggaatgtcttaacaattcaaatcatgggctatcttatcagataaattcaagtttaatgggcaactcagccacatatttcccaaaagatcagagggaactagtgggtttcggagttttcagagcctcgcgtcgagttggagagaataataccattcacagagggtttgtgggcttagccaggttagtgcacactcatggtgccaggcaaaccaggagccttcaccagacgtgccaagctggacctctaggggattctggaaatccggtggtgatagtatacagcatctttcttcctcttcctcattgcccctcctcctcctttttagtgaacatgcaaagcaataagcttcaataaggcatcttcctacatatgcccttaggttttgctcttgcttgcccactcatgcactctcccagtccttgctccatttttttttagtccacttcttccccataatgagttcccactctgatttcatgtcatgtatattctgttatccttctcttgctcctcattctcttcagatgtcttacttccctcataatctctactttattctctctctctctctctctctctctctctctcaacacacacacatacacacacacacacacactcatgcatacatctatatacatttaaatctagatttccccaaatgagaggaagcatacaatatttacttttcttgacctggcttattttatttagcatgatgacctttagcacaaattatttccctgaacaatgatataattgcattctttgtaactgggtgaaattccattgtgtacacataccacattttcattatccaagatgtgggcatctagactggttccaaatttgaactgtcagtagtgtagacccaaaagccaatgtgtaattatgacacatacattttgggtggggagtatattcaggaacggtacagctggatcatacagtagttggttttagctttctgaggaggcaccacgctaattgtcttagtggctccaccagcttatgttctcatcagcagaatgtaagggctctgtgttcccaagcctgtcaccaagatacattgatttttttatagacatagccattctgactttggtgagatagaatttcaaagcagtttgcatcttcttgatggttaaggaggttgtgtgtttggtttttgttttctccggtacttattagccatttgcacttcttcttttgagaactgcctattcagatcaatagcccacttgttgactgggtgattggattgttcttagtatttaatttttggagatagaaatgccctagattgaccttaggtattaatgccctgttggatatttggttggtaaagactttctcccgttctacattgtctcttccctgttctggttggttcctttccagagctgccgtcctcgggcacctattgttacccaagtgacagacgagcagcaagccactgtttaggcaataaacaaatcattagtttgagaatatgctatatgacataggaaaattaactagagagtaagacaagggtctaggggaggacgttagaaggagattaggagagtctttctgggagaggactttgcccagaagataacggtaatacagccccaggcacagaattctaggtaagggacagaagtctgaggacctgggagtgggcacacttggcattgagcactgttattcatggtgtttgctgtgattagcacaaatggcctcctccttgagtctgccaccctcagggacacgactgctgcacagttctcctgtctataccaggactgggatgcaaatcatggctgaacgatatttcaaaatggagcagctgaacaagggctggagagaacttgggagggtgatggagcagaaatgatgatcaagggaggggaaggaggagaagagagtggctaaccctccaggggagggaaattttgaggaagaatctggtatctgagggacactggaatcttaggacaactcaggcaaggaggtccaagtgccatttgaatgacatcagtgttggctgacaaaggcagcctccattgtcaccgcagggtgggcaggttgtcagttcaagaaaatgttctccccactcaagatgtacggccttgggcagaaatccagtgtgtgagtcactaccagatgcatgtcttgttagggaaagctgtggccatagagaaactagtcacgggttcccagaaacttcctgaggatggggcaagggtccccgtgaaggagatgtgcagggaagggggaggtcccaggctggtgacctgatctggtactgtcaggatccatcactaagaccccaaggtacagagaactgtaccactggagcatccgaggctcggctgcctcctctcctcttctcatgtcatggccatagcctcctgaacctctcagaagtccacagagtgcatgaggagggagtgagagaaaaggagtaccctggccctcataccaactgggttcaattccaagaacttcccccaaatggagtgcagcccttgattctctcatctacagaggtgacaagatgggagctctccaaggttccacatagcggggacaaggaggacctcccttcctgtccccccttgtaggaggctggaactgaaacctaggcacatggactttgtcagaaccaatcagatacacatacacacacacacacacacacacacacacaaggctggagctcccgccctgaccaggtctgcatgtctccacttcattcggatagcctcctgcctctcttccacctctagtcctgaggtgtgctcttccccactcgtctctgcctacaagtctctcctgccatacatggaggttcagtgaccacaggaatgacctttccacctagggagagtggctcctaactcaggaccaagatgggaatccccaggggcagtgccattaggaagcaagaccttctgtttgaatcctgtgtgtcctttaatccagaataaatggcaatcctaccacccagcccatgtggtcatcctagccagagtttccaccttggcagtccctcccatgccacgtcatggtcccaccgtgggtgtcttccctcctttatttatgcatagattcttacttctctatgtaattttaagcccattgaaagcaacaaccaagctgcaaagctacacacacacacacacacacacaccagcctcctcttcgacacctgatgcagtgtttgtacttgaagtgttagagaggtatttgtggagtaaatctttcttctgtgcagaaggattctgcccttgtagaggaaatggtggcgtatgtaagagcgcctgtgagtcttagctccaccccctgtacactgtgggacctgagtgagttattaacacttagatgcctcagtgtcctcatttgtaaattagggataatcatagcacctgcctgcgcggctgcgatgacttaatgagtcacgcaggggaagtgcctccttccgcggccaccatatgcttgacaacatctgtggaggcgctcagtctggggtggtccatggtacagaattgtatttcagctttaaaaaaaatatactatatcgccttgacactgaagtttgacattggtttgctgccaaatcttttccagcccctgcattcgattccctacagttactgtgtgtatgtacttgcctatgtgcagtgtgaccccagttacacttggccagagcaaagccagggaagcagaggtggggcggaggaaagcctgagtctctcgttagttctgggctaggcaccacatcaagcactcttttctcaattcctgtggctggacagatgtggacggggttaaggagacagcaagtctccagccttgagtcagcattttgtgctcaggtgcatgttcacacacacacacacacacacacacacacacacacacagagtttttcttttttaagaaaaatgagtttagtgagtattatttatgagagcaaagtgaaaacttctggcaattttatttcgaccctgaaggcaactgatatttaagatatttaataaagggctggaaacaaagcccagctgggagaagcccacaggtagttactttctcttatctctacccactcagtcactcataggacaatagaatgtctgtgggtttacctgataccctctggaaatccaggtttttgttaaatgcagtcaaaaataggggatgctgaggagaagggaagcagactcagcagtagtcagtacggtgagttcacgcagtagctagcatgatgtgaggggcagaacaattataatcacaaacctaattataaaactacttaatctccatcctattcagctttatagttgactctgtgtgtgtgtgtgtgtgtgtgtgtgtgtgtatcttgtctccagccacaaaactcttgaataaaagacaccatctgtcggtctgtaggcagggacataacatctcagtggaccaaagacattagggtccacagccaggagagagacgggtaagcccacgctgaggtgacacctgcaagtcctaacctgtcatgacatcctttgagtcctgtatcccagcctcctccattgtctgtgtttgactcttctttcttggagattatggaaaaattcccagttgatgctgtctctgctggagctgtttatttaaagaaagaaaccactgccagccctgggagcttgggtttccagctcacctttgtgtctcacaggaagattcaagattcccatggcttcccaacctcgcagcagtgctgagagctgtaatcagaggtgttttcaccactcccccatcccccactggagggcatgcagtgcggagagagatgggcagtcattaaaaagtaatacctttgaagaatatgtaacggtacggggacctatgcacataacgccaagtgaaaactgaagctgcagcacgctgggaccccagttatgtgactgagagtgaggcacagtacagagagaagagtcagtgggttctggaggtcgaggatcagggctgactgcacggtgggcaagggtgtatcgggagtggagtgagagagccagagtagttctacatcttgattttggtagtgagacttcaataacatgcatttgttaaaatctgtagaattgcacttgaaaaagcatgttttattatatgcaactcgaatcttaaggaaaaaagacaaaaactacagctatgtgccatagttatatacatatannnnnnnnnnnnnnnnnnnntccccatcccccatccccatccccatctccacacacacctgacaacagccacagtggagccaggattccctgggccagacaaaggaggctcaagcaagaattcttctctccataaatcagacagcactgtggttgctctatctgaagatttcagagttctaagcaaagctttcaaattatggagtacccagatacaggggaggcagaattccgttcaacagacacttgtgactaaccctgagtctggaccagatacagaatccaggtcactgatggcctttcgtctctcccaggtgaagattcaactcactgaaaggctttcaaggcccagagaactcccatcttcctttgctgccctctccaccacagccactctgattaccttcatgtctctcccaccgtaggcacccaccccctcttttacacaactttccccttctctattcccccacccccacccctatgtctcttgggagtcacctcattctgtgttggcctcatgtgccctccttgcaagtttggccccattgaactgtgctaggattagcacaataatggctttgatgtctttgtccccgttctggtaaagccagggttcaccttatccacagcgtggcctgtaatctgtgcccctgtaagggggtggagaaacaagaaaggagcagcctgggacaaaacagttgtagccctccctggagctcaggatatccctgtgctggacaacgatgaagaggaagtgttttctccctctttcattgtgggcacgcgtgcatgcatgttcatgtttttgcaggtacacctacgtatgtgtgcatacatgtgcatgcccatgtctgtggaggccaggagtcagcctctagtataagcagttcagcactgtccacctatttttaagatagggactcttattgggacttgggtctcacgggttaagctaatgtaccctaagaatcttcctgtctccatctctccaacgctaagattataagcatgggtaccactatgagtggctttccctccttttctcaggcatagatacacacacacacacacacacacacacatatgtgaatgatgtgtacacatgttccatgtatgtaggtgcactgtatgcatgggtataagtgtgtgtctgtatgtggagagctgagctagatattctttctacctaattcatagaggcagggtctattggtcaaatccagagctgcattttttaccacttaacccagggaccctgcctccgccttctaaggctgtaatcccagacaagtcatgtgcagtcagcatccaccttggttctgggaatctgatgctgctgaccgaggtgggatatcacctggaataggtgattatcacattaccaggccagggagtgataaccaagctgaggctccgcagaagcagtgtgtggctttctgtctccttcagtttctgccccctctcctggtcgtagtctatgttgggtccagccagagcccagggctccctgtgccatggttctccgtatgatgcttttgccttagggtacaacgacatgttgtgagtggtttcttactgcccagtacatgtttgctgaatgaacatggaatggtctatattagaggaagacatcctagcagagggtgtctctcaattgcaaacctttaatatagccccggtctttttattttcttcttcttcttcaagatgtacagatcatgtaatacctttgggaatttttaaatttttatttcatgtgcattggtgttttacctgcatgtatatgtatgagagggtgtcagatcctctggaactggagctgcagacagttgtgaactgccatgtgggtgttgggaattgaacccaggttctcggaagagcagccagtgctcttaacatctgagctctctccagccctagcttttaaagtgcccagcagtgtaacaagattagaccaggcccagaggcaaaacagtgacccatataaggaaattctgtctgcatattttttctcagtaacattttgcttcatagggccagtgtggcaggggttgtaggccagcaagagaggagacgtgcatatttggagatctaaggatgctacagagcctttcattcattcatagtctccttttgagctctgccattcatacccagagctgcaggctccactgggcatatactaaggcagtccctaccattgctatctggcatccctcccacgcaggaggaggaggcaggctatgtgcatagccccccaaggtgcacagaaagaagaaataactggagtcaaagaaggggccatgcaagagcagcagcccagtgcctttcatctccatgcatcacaccatttatcatgcttgtcaaaactaacggttagctggaacagtggttctcaacctgtgggtcgcgacccctttggcaaacctctacattcaaaacatatttacatcaggattcataacggcattcaagttagaactatgaagtagtaacagaaataattttagggtgtgggggatcaccacaacatgaggaaactgtattaaagagtcacagcattaggaaggttgagacccactgctctagggggctggagaaaagctgtgttcatgaataaaccaaagcacagaactgattctgtgagcctggtctccgggtctgagagtccctgctggtgggaccccagccaaatcattgtgctactctgtgctctggtggctgcctaatcgcctgtgaataacaatcggaactgtcacaaataagagggacggccatcgcttacccagttctactctacctccatcagacatcagggtgagatgctagtaattagggtaggaaggagggcggaatgtttgagagagtagcctgccccagcccagccatggggctgcccagagcgtaggagctggaactggcagacatcagcgagacaggacacacagatggaattctcatcaattttctgtaaaaggtggatgttgacgggaggcagatagaagactggggctatggaagggctgaggttagcaggttgaagagaaaggacaagtcacaggatatcaggtgtcggagcaggcccaggcttcagaaaggtggagccgaggtggacagctttgtccagcctttgtaaagggctcaggaaatccttctgaaactacatgcaaccacagctgagtcaaggaggtgtgggggcatgctgtgtggtgtgctgtggtcacctttcagggcacttggcaccccactgctggtgcttgaaagggtaggacatttgtgtgaaccaaggaagtgtctgcattttcttggcatgtgccttagtcagggtttctattgctgcaacaaaacacaatgatcaaaaaacaagttggggagggaagagtttgaataaactcttccacttccacattgctgttcattcccaaaggaggtcaggacaggaactcaaacgcaggaacctgaaggcaggagttaatgcagaggccatggaggggttctgtttactgacttacatctcatggcttactcagtctgctttcttatagaatctaggaccaccagcccaggcatggcaccacccactatgggctgggccctcccctgttgatcactagttgagaaaatgcctttctgctggatcttatggaggtatttcttcaactgaggctcctccctctctgatgactacagctcacttgtgtcaagcaaccagtcatgactctctgtctcttagaggaggattttaatacccagatagggtcctgaaaccaatgcttcatgggaggggagcctaactttaaatcaaggataccaatgggctacttgagattgagaaaaaaacagccatggacctatgtgggttgtggactatctctgtctttgtccatgcgtcccacaaaaacccatcttatgggctggtgagatggctcagtgggtaagagcacccgactgctctcccgaaggtccgaagttcaaatcccagcaaccacatggtggctcacaaccatccataatgagatctgactccctcttctggagggtctgaagacagctacagtgtacttacatgtaataaataaataaataaatctttttttttaaaaaaaaacccatcttataatgtgagtttggaatcaaaacatggagtaggatgtcactaatcaagagcattgaaaggggatggagcctggagagatagctcagaggttaagagcactgaatgctcttccagtcctgagttcaactcccagcaaccacatggtggctcacaaccatgtataatgagatcagatgccctcttctggtgtgtctgaagagagctacattgtatctgtatgcataaataaataattctttgaaacaaacaaacaaacctccctgggacatccctttcctcattcttttgcccacagaaccctataaaagagggagagaaggattgtaagaaccagagggcttgaggacaccataagaccatgtcccacggaatcaactaagcagggctcacagggactcacagagactgaagtgatgatcatggagcctgcatgggtctgacctaggtcctctgcaaacatgctgcagctgtttagcttggagttttggaggaacttctaacagtgggagtggggttatctctgactcttttgcctgctcatgggtccctttcctcctactgagttgcctcgttcagcctggataggaaggtttgtgcctagtcttattgtaacttgctatgctccgtttgagtgctatccctgggaaacctgctctttcttaaaaggaacttgaggagcaggggatgtggaggagtaggaaggtatgggggggggggggactgagaggagtgggggttggagtagaggctacagtggggagttactgtgtaagaagagaataaataaactatgtgtgacatcccttcccccatcatggctagcttgaggcctctggtcttctcttggaaacagagaatagtaactctcacctgcctgaaatagcacttcctaagggtcactcactcactgcctggtctccttggggaaggggagggctcttctcccagataggtcattctatgggtagggatgagagatctgaattctttgaatcagaatcaattagacactgggactctatgcagaagcttgtgtccgtccgtccgtttcacacacacacacacacacacacacacacacacacacacacacacacgaggggaatggtccaagacctggggattttaacataacagagaaggggatgctcgtctctggcctgagctcatcactccccactgcagcagactgctcttcccaagccactcttactaagcatggcctgcctggcccttccttttactccgcccacagatagtgtggtagaaaggaatgcagtttccagaagccaatggaaatggcttgaatccactctccccgtcaccagctctttagcggaggcagctaactgtggcttccctagctcatttcctcacccggcaatggtcagagacttcctcccatggctgagagaataataaagcctgtcgtacagcccgcacgtcgcctatggctcttgttaaaatgcaacctccgaatccacagcccggagcctgccttcccagctaggctctctctcttgaggtgtgagtttgtgagtttgcactttgctattcaaaggaacacgtctgcacagcaagaatcctgctcaggtgtgtcaagagcaagtgtggggagcgtggtaaagactcaataaacactaactccagccctgatgattctctttacggggtcaaaaggtttcccccgtgagaacacagaaagttcacttgggagttcataaggaaacaagaagaaaaaaaaaagacagggtttgaggatcatggccatggggagcaagggaagggagtcccacaagccgtaagcagccccatgtgtccttacaaggtacccccactgactgcctgcagagctctagggcctagacctcagctcaccatgctatggcacagaagcagaggccccgcgttcgcgcacacacacacacacacacacacacacacacacacacgccctgttctgccagctacagctctccagaggaattttcaaagcacacagggtgtgtttggcaggagtctctccacaggccttggggccttttgctttaaggactgcattatcttttctgcttgaagcctggacactgagcgtccccctttgctggtaccctaaagaaaccctgcacaacctgctgctggtgagaggcaaggatgctctgaggagacactgagtgaggttagacaagcccaaacccctttccacacccaagccatctgcctttgctttcacacgcctaaaaattcttttttgctacaaactgctgactcatccagagttggggtcccctccccccactttttttgttcctcttctttctctggctcagaattgccacaaagcctggagattgtgaagttgctttgatgagtgcctgggtccttacaggggtttattttccccttcccacctccatcctagtttcccaagggcttggtcctgcttggatacagagctggatacctggtttgttctgccctgcttctcacacagtctcttcttctttgcaggtctccatgcactggctgctctgggaatctggctgcaagatccccaggatgtaaggaactcacagcagacactggtaagtggtacagcagtgggctgtgcttgcacctggcccaggttgatgtcggggaaaggataggagctgcatgggaaagccaacctggcaactctgtttccatccacccagcacctggacacagcacagagccaagcttccaggtgtaaacctcccagaatggcttcctgccagggcttccctagacgccatgagcctgcaggtggctggctctcccctctctgcacagatgacagcaactcagacttccaggccagggacatatttttagagttatgttcaaaatgaggggaaaaagtcttagaacacagtgtgtagtgcctggcttagccagtaggcaaagccaccctaaagtactagccctgataagagctggggggcagaggggggtgggggcggggattgttgatgacttggactaagcaaaactccctgacaagagatatgcacaaatgcagtgaaaaagttgggtcactagggagttccctgtcagtgacagaattcaaggagaggctggacaaatgtcatgaaaaatactgaagtgggaagctttgataaagcagtgttttcccctcttctgtgataatctagaacctttgaggggtgggatgtataggaagaggatggaggctgaggagaagaccggtggccactgcagagtctactgagtaaggaaaccttgcgtctttcctgtgccccagtgccaccagctgatgccggacagctcacacgcacatctgtaatcctaaatacctggtgtacatgatagatgaagagtatgcaaagagtatgatgggaggtttttctggggagtggcttagcagtggcccctcccacagcagggctacccaaagaacgttctgctagtcacaccatcagaagatttggtctaataggctgactgctcagagtggaagaaaaggcctagggagcctgtataaaaaagggggtggggatggggtgtcacccttctgcccaattcacaggaggaataagggaatacatgggtaagacccaagtaggtggatgccagagaatatgaaatggactttacccagaagtttggaatccttggcagggacaagacttatcccacacattcggatgaccaaacccctacctgccagacaggagaagagctggactccagacctaaatgagggcattaggcaggagtgagtccaagatcagacttagcacaagtgactggtctctgtgtcctcagggtagtgatgccactgtttgaggacagaaggggagaggaaagaaagggaacgcagaggaagtgggctggatggtgactctgcgacatgaaccatgacatccttaaagctgagctgtgaggataactgtgtccttgcacgcacaggccctggcacataataggtgctgagccgatggtggtgagataaagtggggaaggggaatgcaaggagagaatatttgtgcagaaggacaggggtcctagagtacaccaccacgttcaagtcctggctctccactggctttgtggccttgggcaagttgctggcctctctgtgcttcagtctcctcatctgagaaatggggacagggtcataaggattccatgattagtataaaactgtgccaggacacagcaaggacttcatcatgatcaccccttcatccagagtgtcatgggggtcagaggtaaagctggggctgtagtcagaggctctgctgtagctacatggtggaaccaggatgaagttactcgctctgaggtcgttctccaatctggagatgctgtgtatggtctactgggtgtgcatctttcctgctgtctctttcctgtttctgaccctgctccgaagtcagttaccagctgctggccccagggaacatggtgtggctcaatgtccagttcctgcctcctccctcttgccatctaagagtcttgattgggttcattttctctgccagttaaagaattaagaggcaaggaaaaagatcttgggtgcatcagatagcagcagagaaaagacacaacagacagaagtcagccagtaaaggcattaatggggcaggggcatgaagagaaaaagactctgcagagggggcactcagaagcctcatccttgaggtatggggatattctaaatctttgaggggatctctccccccccccctctctctctcctttctctctctcccttcaacccactttttcaggtaaaggaagggaagcattatgtctcctttcgctttgtctccattttttctgtatttcttcctaaggcggtacagcagggaccagccatgtctctgctgtatatgtggaatgtgagctaaaaatgtttgcctgtgtttataactgcaaaacaaaaaccccaaacttgactcttctatggaaactgtgtattgctccattttcagttgctataacaaaaaaaaaaaaatctgagtctggataatatataaagataagaggcttgtttggtggatgttagaagcatgtgtggaagagacatatgacaagacagaaagccagagacaagagattcaggcttgttttcattatgttgccttagtctccctagcactaataaaggccctgagagaactactttaatctcctccaggggtggcactcccaatgacctaatcaccttcattaagccacgcctcttaaaagccctgcacaatcctggaacccagccttctaggtcatgacaatttgatggatcccctcgtacaccagacagtggtgtacgaccaccatctggccccttccatggagaacatacagacttcagaaaacacttgggcagcggacaggacccactgggctctttcaaatgtgagtgcaccttgaaatagtccttcagtggtatcattgacaacctctgtagccagagctgcggtgcccgtagcaataacaggccagtggaaaattgggtggttgggatttgaggctattatttgtcatctctcacctgtcctcagacacaaagccaacacagctgtggtcggctgacaaaggtggaaggacaggtttgggagagtgagtcactcctcacagtacagggagctagctaggatttgacccaggcagcctgcttctaagcttctttactttgcctctctgttgctgccacttgttctccctgtgagcaaaagaaacagtgcccccaccccctgatttgctgtcctggctcttttcccccaactttctggcaaaactcctccccacgataaaagggcaaatgaaaagcagaagatctgtcagaaacagctctaacacaaacagctagaatttgttttccagaattccttcatttgtccatccagccatccatccatccacccatccaacaagcacaactcagctccaggacctcatgacagccttcatctttggcaccagcagcttgcaaaagttcctggatcctccagagtcattgtcaccagatagctcaaaggaaggctcacttcgtagtgcaaagcacttgattaatatgctgcaatttgggcagcgctaggctgttctggcacccccacccaactctgttgccatgacgacattattttaacaaacagctctttaatatttaatgaaaattatactctgacaggcgggcagaacaaccgcaccacagagggcttagaagggtccatgaggacaactttgcacaaagccatccgtcccctgatccctgtaagctgtttgtcaccagaaaatgcaggtgctctggggccaggagtcactgtgatgccagacatgggtcatgcatagcaattgaagcttgtcacatttttaaatgcaggatgtcacaacggtttcatgaggacagggtagcgtgatagcattattaaatactgctttctacaccgagctgccgaacccacccccaccccccaccccccagctcatctggggatgctgagagccttgtctgcttcctgggccttgagtcaggctgaattgtaagacagcatgtgaagagagagcccagagtgtgcatgccaggccgagaatcagcctgtgcctcctcgtcaaagcgccatctgtccaaggcagctgattcagtagcagaaggtgcagagattaggcgatccagacccctgcctcaaaggggtgtgtcaagacggaaaagaccatcactacgctctggcctcctccatcattgagttagtctgtacaccaggcactgtagtaagcttttgaaggcaaaagtcattaccctctagatctgcaatgagaaaaatggatggataactaaagcggagagaacaatacggtggtctctcagttttctcatccataaattgggaatatagcactatcttcacagatagctgccatggggttcaaaacacaataaatacatgagaagacctagggaaaagtatttaaaacagtgagacatgccaagtatgacatagatgctaggtaggacttctttgtccatagtaccacgtttatcattataggagctagcatgtaccaaatgcttactcttctgcatctctgaggctgatttggagctgtacgatctcattgaaatttcacagataagtctgtgagactatataatcctcaccatcctcactttgcaagggaggacatcgaggtgccatggagttccaggatctctagatgaagtcttgaaaatcccctaggtaaacggccacggctaccacagaagccaggaatgtccactgacagcatgggactgaagcagggaagagcctctggtgcggaggaaggagcctgcagcagcagacatgagctgtatccgagggagggagcgtggtctggctccacagttgaagaagtagattcttggcaccagcagaaagcttgtcttaaacaaatataacctgtttatttagactgtatataagacttttattaaaataaatagattgggagaagaaagggaaaacagaagggaaggtataagacttacagttttctgttcctcctactaggatttcactgagtatctgtatggcgagcataggtgcgcgagtgcatgtgtgtgtgtgtgtgtgtgtgtgtgtgtgtgtgtgtgtgtgtgtgtgttaaataacagcccctgcctgttgtatcccagagcaaagaaacaagcagagaaagggaagttcaaattgtgcaccaaaatacaggcaaagtcattaaggaatagcatgccccaatttttaaaaccccttctctggctattttggttatttattaccatggtagtgctttgtatcaaacaaccccataagcctatggaggacagtaggacatatttagtcagctcccaggtctgaagggtgaaatcaatggcctctcattccatgagatggctaacatatttgatgtcagtttagggggaacatggactgtgtgctgcttgacatgaggtaacctcaactaggatgacaaacgccaaagctggataagtcattcaccctgtagaggcttaccatggcatgacctcatgggagcgacagtagagtctacaaagagaaaataacaggacatatagaagccttagttatcactaatatccaccctcccaaagccagtcacaacgcagagccaccgtgagagagctccactgagctgtgccacagagcatgggggtgaggaggcatcatgactgagctatcacccaagcatggtcactggactttcagagggaagagcccaaggttcaggacagtatgtggcttccagaggtcccactgtggtagggctggaatgtggacacaagctgactggctggtccaaaactggcatattttccaacttctgctcagtaggaagatgctcagaagaggaactagaatagagttgctgttgtctttctgaagctagagacccagttgcccctaaaggaggacagggcttgtggaatccgtgccatagaaaccacatcacagccccgggagtacgcaaacccattgctgcctgctgcctgctcttccgactgtgggaattcaagctaggaggtcctgtgtgcctccaagaagcaaccaagacgggacattccagtgcacaatttgagctctatgaacctgagtgactccggatggtagttcatctccattgtcaacttgtaaaatcacccaagagacataacacaggtcatgtctggagcaattctactaaaagggaaagacccaccctgggtgtggacagcaccatgcctccatgggctagagtcccagactgaagaaaagggaaaaggcgagtggttcaccttcgttcctgcccttctacttgtagttggaaagcagacccagccaagagggtatcacattcgtgctgcatgccgcccaccatgatggacactatccccttgaacatccactcaaactctgagcaaaactcaacccttccttctgtgtgttgcttcttgccaagaattgggtcagcacgagttaagtcactgacatactcagagagctgcagcatcctctctcttagtcacaacacttgatgttgacacccagtggccaacttgagctaggtcttccgatgcaggtgtgacattgctgacaggacatttctgccacatgggcctggataacaagaataaaaggagccaggctgaagtgatcagcctccactgttggcacagcagacctgtccatgaagccctttaagcacgttgacaatgtggccttttctcttacggggaagagcatggcagaaatgaatttctaaattgtacggagagggaaactgagtaagttaggttctggtaacctgttcctagaggaggtaaaagtgaagacggacacaaactaatcagagttgagcatccttctgtagcagtaactatccatgccacctgcgcaactcagtcacttctctgtgcccatttgcccctccacagagcaggctggcatctcagagcactcagtgagttaatgcatatcaagcactcacagcatcacacgggtaaactcaggaaaccgcacccgcctggcattgctgctgaacattaagacacaaatggaaatgaaacacattgacaaataccatccgtggcatggggtagagccatccaaggtgtgccgtgtgacaagaagatgaggagtcctttgggatgagtcacctggccagggtcaaatgagaggcagtacagagactagaaaccagctctccccaatctgactctcctgagaaggggctctgtccccacataagtcactcatctcccactctgattctccctgttcaaaacatctctgtattcataggtccaacggacacccacacctccttcccactttaagctcctaaatgcaatcatgctacgtactcagacctatattagccatgcaagaaggatgcagtgtgtatccaagaacaaacacttcattaagccctagatttaattaacttaaatcattttccatcccagctcccatgtcccacttgaaatagagagccattttaagtgtagtccctaactcttaactagaagttctgattttagtggttttgaatcagactcgacattaatagctcactgtcttcatctgcccccgaggtagcttcctcccccatgtgattaatttcatttttctctggccttgtttcagacacaagcttcgcacgcactgtattcttttatgttgtggctattgttactttaaagggagagctggaaacaagagcttttcatcacatcattctacatgtgtatgcacacgtgcacacacagaaaaagctgcatgcttttgccaacattatgaccattatgaccgtggtcctctgcctccctagaatcttcgatttcatttggaggctttttctttgtttctatcctgcacagaaaataacattaatgaaacacccaaaattcgtctctaggtccctagaatgtcctcttcctccccagatacagggacaacagttttattgttttctagtctctatttctggccaaggtacagacccttccatctcctatatggacatgagggacacattagttgcttctgtgctgctgttactaaacactattgctaaggcagtttatagaggagagagtctgctggggtttacacttcaagagggttagagcccatgatggcaagaaagcatggcagcaagctctaaagatggcagatgcagcataaagcctaccgctaacaccctcacttgaaagcatgaagcagagaaagtgagccagaagtgtcaaggactcttgaactctcagagcctgtctccagtgacatactccatgcagcaaaaccacacctcttgaaccttcctaaattgtgccactaactgggggtcaaattttcaaacatctgcccatagggggatgtcttagtcagggtttctaatcctgtacaaaacatcataaccaagaagcaagttggacaggaaagggtttatttagcttatatttccacattgctgttcatcaccagaggaagtcacagggcaggaacttgggaggcaggagctgatgcagaagccatggaagggtgctgcttattggatagcttcccctggcttgctcagcttactttcttatagaacccaggaccaccagcccagggttgggaccactcacaaaggtctgagccctcccctatcggtcactaattaaaaaatgccttacagctggatttcatggaggcctttcctcaagggaggctcctttctttgtgataactccagcttgtgtcaagttgacacacagaaccagccaatacagggagatattctcattcaggctactaaaaagtgtctccccactcaagacctaaccaaactgttaattcttaaattatgagccaaagccaggtatggtgtcttgtatctgacatctcagcattcaagagagtgcagcaggaggacttaacagagtgcatttgaggccagtgtatcctgtctcaaaacaccaataaacaaaaagtcagagcatgtacttcccagaacctgtacccatctataccttttgctatgcatagtttgacttctagactttgtcctgagcctggaaaggtctcatgctcccttcctttccaatctcatttccaaccacatcccttctcacaccctagatgccaatcccactgcttcttcttgttcttcgtctgcaccaagcctgagtccttgacagaatgatgcacttactgctatgtcttgcgcgcgccctgactcgccagcaaagcagacgccacaacaggatccttctgcacacgtttattgggagagcttgattgcagaggcgaagagaccccaagcccagaactagtgctgcttatataggcctaggcgaggcgtgtctcacaccccgattggttatgcatgggttatgcttaccacctcatttgcatgtctcacatctgattggttaacttctctctcatctgattggttaacttgtctcttatctgattggttaacttgtctctcatctgattggttaattctcaaaacctcatcttggcaaaaaaaaaaaaaaaaactttactacctatgtattcgtggtggccagcggtagccagcaccaccctgcaatggcacatgtggcttcccacagctatgcctgtgtagattcactctcccagcctagggtccctcaaaaatagaggctgacacaaagctcatagctttgtatgatgcacaagacagggatgggtggggatgctgtacagtcccagacaacagcaagagtaaggagaggcaagaggggagaagaatgcagatcccatgcatgcaatgttcagccaccccatcgctccatgagctcccgcaagttgccacgacacatgaagtcttcagagtggccatggggattgtatgcagggtgtgtgtccctcaaggcaccgtgccacaaaactgtatgaaaactcagagggccatggggaagatgtgcttaggagcaaagtgttgtgagtaggaaacccaggtgctcctaacagaagcatggttttacaggtcacctgtggtctagtaatgcacaaatagggcaaggagtgtggccccttgcttggcagaaaggcccacttgacaaaggcaagtgacaaaagtgtcgccttgtaaatgactgtgatgtggcagaaagacggtgtaattggaccagctgtgaacgttatagctggtaagccatcaggtaaactgaacaagctggtatgtttccgaggtgtgcatgtgttttgttgtttggtgcctctgagagagccacctttcaccatgtgactaacctcaggaagtagtgacatcatagcatcctgtgtacttaaaaaggaaggagacagtctaaggactcggggtcaattttgtgtatttcctgcacaacactgttcagttgaactgtttctgtgagaatacctactgtatctccctgctgaaaacaggcacaagcaaaagctaaactcacatagtgcatagctatcctctagttcatcggtcacgttggaacaatgttttgttttcaagcattgtagccccactgactctgctaagtcttggccagtggggctggtcagagacacattgaagcaggagtcattacggaggaagaggcaccatgagctgttggtgggtatgagagagagagagagagcgagcagctagcagcctgtcatgaccctactgctgagacctttcttgctccagggaaagtccctggactgtagccagtagattgtcttgaccccattttccaaatgatgtttggcgcactactgagaacttaaactcaatagcatgtcaaacctgtcatccctagaagcagcagccagaagccagactgcatttgattggaatcaaagcaaacacatccagcaagagtgaaatgtaggggatgtggagaactgccagcccctcctgaccatcctatatagacaaggggacttgggtggcactgaacattctcatgacatacgattaaaaaaattggaacatgccgggcgtggtagtgcacacctttaatcccagcacttgggaggcagaggcaggtggatttctgagttgaaggccagcctggtctacagagtgagttccaggacagccaaggctacacagagaaaccctgtctcgaaaaaccaaaaaaaaaaaaaaaaaaaggaacataattcgcagccactagaagagaaaggagcagccccctccttaggagccagctgtcaatggctggatacatcttgaattgtcacaggatgctattagcaagctgtacaaaacctgtcaaacacacagagcccccccccctctgccatgaagagttctctagcccaaatggcagtcttgtgaaggtcaagaagccttgatgtaaaagtgtcatggcacgtgagcacgcacaatatttttgaaaggttgtagggaggtaggcatgcccacatcagctggggtgggggtggggagactgcagcccatgtaatgcggctgcccacactcagggtaggttcaactctcacagacacacaagaagtccggctccctagtgactacaagcctcatcatcaaccgtgaagattagccatcacgaccctgacagcatgcctagtgcttgatggcttgagccagtcttagaaggctgcacaagggtggaagtacactataatcgagagagagagagagagagagagagagagagagagagagagagagagagagagagagagagagaagtaattcaaaccacttaataaaataaagaaagctccacactggataattcctacttcaaaatgttctgctccaagcaaaactgtggaggtagaagaagatcagaagtgggggtggggataagcaggtagaggacagagctctaaggcagtggaactattctgtgtgacactgtaatgtcaccgggtggctgtgcatttgcccaagcccaagagaataatcagtacaagaggaactctggcatgagctatgggtgtcagttagtagccatctgtcattgctgttcctcggttgtaattaacacactgcactgggagggaaggagaagggttacttaaccccttctgtgccttctgtccatcttcactgtaaacctgaaactgctcgaaccatcagtctattgaaaatgctcagggcctagcatgtgagtataaccttcaatcccagtgtttgagggatggaagcaagatgatcaataaggccagcctcaactaccatagagagttcaaggctagcccaggctacctgacatcctacctaaaaaggaaataagtacaagtttaaatgatatgattaacagagttgagataattgttataatcatcataaggttgaagactgtcgcttaattccaaagacacttaacacatattgcattgttgattctgtccttgttagtgagcagaatataccagaaggaggaggggactgtcccatctaaatagcattcacttaggtccaggcagacaaatttcagagacttatgcatcaagtctccacggctgctctaggagagaatctcaatcgtaagacaaggaaatggagacttgtggaggttaagtcacatgaccagagtcagaaagcatcacaggaaggatttgagccagatcaattgttgagccagtatagctgatattatggtgtgtgtgtgtgtgtgtgtgtgtgtgtgtgtgtgtgtaggttggaaggttctagaaggtaacaagagacaggcacctctcagctgtcttgagccactagaatgggtggtgggctgagggacccttcccgctggcctaccgccctgttgtgcctgagtctttccatgtgggtgtggccatcttgccttgtatgcccgccagggatcatcatggaacagtgtccagtggtggcctgagttgagcggtgtttccctctggatctgctctgcaggtggaacagtcctgcatcccttgccttctccaggttgttcaaggattctaagctccacagagaaaccactccattcccttctgcgaggtatccttcactctgacgaccaggcagggccatccatccttaagctggcagggaagaatagactctggttttgcagaccaaccctgttgcatatccggtcagaaagaccctttgtaccttagacactaaaagaaacttctctgaaccagtgtttcctaggcctctgatcagatcactgtagaccagctgtgtatccaaacactctcctcccattggcctcacctcgttttttacaatgtccataaagtgttagcctccagacctgaggtatccctgccacaccccactccatccttcccctacccccatctttcatcctgtcttacctgtccacctattataatatctcgtcaccaccctccacccactcacaaagatacctagcccagaacgtggctcttgccagagtaacttctgttcccctgtgtctggtacagtgcctgactcagaacatgtcaggagagtctgagacacactgcacagaatcagaaacagtcttgacctggggggcagcaaattgacacagacattttttttcctcagtccattcgagaattttcagtgaaagcctatttcagctctcatattgcttttcaatcaccacaattgattccccttacccttgtccccagtgaactgtattaaattgcaattaacgttgatgtgggttttccctctccccgcctttgaagggggcacacaggtggcaacagacagaagggcctagtcctatcacagaggaggtggaagctcatcaagggcatttgcaattaaattaggtgacacttctaccagcggtgaaaggctctctgaggaagggaccccagcagggtgatgcccacttgcagggagctggagtctatccagaaatgctgcaggagccacgactgcatcgcacaggaagacggttgggttgaccgctgggatcatttccaatgtaattggcttcgtatagctcgagtttaagcaatcgatttctataagctcttttacagttggaattcataaacaaatctgtgcactctcgccctgcagcgtcctgtttgatttctggtcccttgctcttttttactgatgcctaaactccccgtgtcacgagtacagacctgacaattcaccctggctgcggatgctgccttaaaagacacaacagaaaggagatagagagatgcaggccctgcccttaaggtatcccacgccctggctgagataagaatagaaaagaaggaatgttctgcaatttgactgtcagaaccatcttaaaaatctcccgttggatcctgacatccccagccaagccagcccatgccagagaaggagctttgttactttgttactttgttactttgttactttgttactttgttactttgctactttgttactttgttactttgttcaatcagcttactcataggggttgttttccctcccctgcaatcactgatgcatcagcctgccattcattaagattactcttattgtcagtcatagcacagctgggtactctgtctccagaagaccctctgcactgacaggagagcccatgctggggtcagaggtatggagtctaccttactgggactgggatggctctcacagatggaagactcggagggaaggcaagattacttgccaagctagatccaggatcccgagtcaccttagaacttgccatgactccttgctatgactttttttttaattgatttatttttcattagaaaacaagtataatttttttttgctttaacgtcctaacgtcctaacagaatacttttattaattctttgagaatttcatgcaatgcattttgatcatatttacccccccccccgcgctcccctcagattcatcccctacctccctatccaccccaacttcatgcactctgtttttataggtgtagcctacagattctagtttgtgctgctgaaatactcatgggtgtgggaccatccaatggaagttgttagaccgaccagggcccacacccttaaaaaaaacctaactcttccttccccaagagagcatcaactgtcaatacctcttcagcttcgaactcccacccataccatgctaacacattgtctgacttgacctcatgcatgtcttgtgccgacaaccacaactcctgggagttaattggtggagcagaagaccctgctttggtctggtcttccccaacctctgactcttacaatctttccaccatcggctatgatgatccctgagccttgcagggtttggaggggtgacatgggtgtcttatttgaagctgaacactccactgacacttaatctatgcactttgatcagatgtgtgtctctgtgttaacaaccatccgctgcacaaggagatttctctgagaagggctgcactaatctataggcatggagatagaaatttaggagacgtgttgatatatccgtttagcaaaataatagtagcaagttcaatgctggggtctgtgagttccccaaccgtggttgcttgtccagatttatagtaccaatcatgtgttccctcttgtggagcaaattttaaattcaatcaagaagcatttggttacccccataacatttgtgccactattgcaccaatagttataagactattgatggctagttagaagactgttgatggactctttctccaggagcttccataacaccatgcagtactctaaataaatgctagcagcaaagatgcttggtcattaccaacttggtttctttatgtcctgtaaccaaagtgtgtcatgtctttaacaagaaggtcttgccatcaagattaagtagagaatcgagagcagtgatagtagcctggtttcttttggatcctctacaaacgcagtatgtactcttaactgctgagtcatatgagccccctaatcttttataaaaggctctgattcactaaaaggtatgtattctcagaattattttattcctttttagtttcctcttagaggaaatgggtattataagagttacctcataagattcttgagactgtgtgacagataatacacgtaaaggtctgtagtactataatgggggttcagttgtctcagaatctgcaagtgattaattccaagggtccagcaggtaaaatatccatggatgctgacattccttacatcagtgatgtatgtaatatttgcttataacctatgtgcatcccccatattcaatcatctccacactactgagtgcaatctaaatgctaggtaaatagttgtagcacgttggttagagacaaaatgatgaggaaaagcctatacctactcagtacaggtacagtatgtcttctttgtatgcatatgtatgcagttaaacatgcgtgtatggttacaaatgtgtatgggcacacatgtatttgtgaatgagtgtgcatgtatgtaaacattcacgcagaggccagaagacaaccttgggtattaatcttcaggcacagagcagcttgttttttgacttcaaaacactgatatgtaactcaccaagtaggctgggttggcagcccgtgaggtacagagattaactatctccacttctcctgtgttgggattacaaagcttgccaccacacccagatgcttttacatgagctctgggaattgggttcaggccctcacacttacaacgtagcatttatactaactaagccatctcctcaagccccaagtacagtatttctatgaatgcttttggttcttaaatagttggctctctaggtatagaacctacagatattgagggccatctgtaacttgcatctgggacatgagtctatgttatgaattgtgcatacagtagcttatttaatcactacagaaacacaatgtcttagttagggcttctattgttgtgaagagacaccataaacaaagcccacccttacagtgacacaattactccaacaaggccacacctcctaatagtgccactccctgggccaagcatattcaaaccaccacattccattccctgacctcattggcttgttcaaatacatgagtctatgagggccgtacctaaacatagcatagtgcaaaatacatgtattccaacttcaagagtccccatagtatatagcaatctcaacaatgttaaaaacccaaagttcagagtctcttttgagactcatctaatcacttaactgtcaaaaagtagatcacacacctctaacatcacaggatgtacattaccattccaaaacatcacagtgaggaaatactggaccaatgtaagaccaaaaatcaattggtcaaactccaaactccacatctccatgtccaatgtcaaaatgctcttcagatcgccactcctttcatccttgttgactgctgttggcaaatctgtcatttacagcaacaaacttctttctcctgggctgcttccaccctctgttagcagcattcctcagcaggtatttcatggctctggcatctctaacatcttggggtctccacgacaacttaaacttcacagccacttgttccaatgtctgggatccatacatgatcttctggattccttcatagggtttgagtcacttctccagctctgcccctgtagcactctagactctggttgattccactccactgctgctgctgctgttcttggtggttatcccatggtattagcatctctagtacactagggtcttctgctgcaactaagcatcactaatagcctctcataggctctcttcatggtgccagacttcaatatctttgcatgacccctccagtcctgggctgtgaactgcaactgaggctgtaccttcactgacagcttttcctggtatctcatagagccaagcagcagctgctctccatggtcccttcataccttcaaaaccaataccagctgggtgattcatacacattaccaagtccagctgctgcataaagtacaactttggttatctctggaacacagattctttgtgttctcagaaaacacttcccagaagatttcacctgttcttaatcaccattagattcttagctccagcatcaattgtcatagtaaactcttctatccttgactctgaagccagaacaacatggcagaagctgctgaactctgatgcttgcaagggctgaaacatggccctccttgtcctattacactgtcgccagctttctgttttccaactccttcactgcctatgcttgcctgtcctggaacttgctctgtaaactgaccttgaactcagaggtctttgtggctctgtatcccaaattctggaattaaaggtgtgtaccatcacacctggacctaaacttttctctacttggaacttgctctgttcaaggctggccttaaatttgtgatccttctgcctccatctccttcagcaaatcctaccagcatgtgtcaccacaatttggtggtatcttgccccaaggacatcactcccttactctgttgatctccttatgttcaaggattcagctccattctacttcctgatgaccctttaatacttgaaccatacattttgtattttttctttctaagcttgctacccttgatcaaaataattttcaagagagtaaactaaaggaaatcgtctatgctaggcttttctgaaatttcctttgtcaatacaattaattgaaatctctttaccttagcctcaggcagactcttcagacaaggacaaaaagcagtcacatccttcatcaaaacatcataagaatgatgttcatgcaacatactaaagttcctctccattgaaaaccctttagcaaaggctacacagttctaatcacccacagcaccagtgtgtcttttgtattcctactaggatggtccattaagctccacttaaagtattccactgattcctaaacccaaagtcccaaaatccacatttctccaaacaaaagcatggtcaagcctatcatagcaataccccacttctggtaccaacttgtatcttagttagggtttctattgctgcaaagagataccatgaataacgcaactcttataaaggacaatatttaaattgaggctggcttacagattcagaggttcagtccattatcatcaaggagggaaacatggcaagtatccaggcaggtatggccctggagaaggagctgggaattagacatcttgttctaaagggaaccaagagaagactgtctgatgcgaagctaggaggaaaatctcaaagcccactcccacagtgacacacttcctccaacaaggccacatctactaatagtgcaactcatgagccaagcatattcaaaccaccaaacacaatgaggtgattttttttccagtgttgttcatctattcattctataaagtactgattgggccatggagatggtgccatggttaaaaactcttaacatacaagtctgacaacccgagttcaactcctggaacttacatgctagaatggaagaacccatttctgaacactttcttttgacttccacacacgtgtcacacaggcatctgtacccatatacaagcatcatttatatggacaaaataataataagtaagccaagagtatttattgagcatctactatgtaccaaatggtgtgcaaaatgttgaagttccatccatgaacagaacagaaaagttttttgctgacgtggaactcgtgtcctagtagatgatgttacaccgttttacaagccaggacaccagaattcagagatgatacctcacttggtcaatgctcacatagtcacccttttggctctctacagctatcctcactgattccttggatcataacaccaaagagatgtgatggaagttttgctaaagtctagaacctacatgaccccatcttggtaatgtttagacaggaccatgtgtcctccaagagatacagtattcaagaatgaggcaatattgtatacaggctctgtttatatagttcattagttgtgtttgacctgaaaggaggttttactcctttgagtcttgatttccatagttgtaatatggagtatgaatataatagccaagaattatgatctactttgagatgactacctaaaggaaaagcactttgagaatataggtcagtgctggtgactgctaggatgtcacaggaatttctttgaagagtatcctgaactatttccagtactgggcacttgaccacctttatcctagttttctttaactcccaactcgacatagcctagagtcacttgagaaagggctctcaaatgagggactgtccagatcagattggcttgtggacatgtctgtagagggttgtcttcattgttaattgacataggagtacccagcccactgtgggcagcaccattccttaggcagatgttgctgggttatataagaaaactagctaagcttaggtctgtgagcaagccagcaaacagaagtctcctaccatttctgattcaagtcctgattgagttcctgccatgactttcctcgaggatgaactgtaatctgaaataaaccttgtcttcccctaaactgcttttgccactgttttatggcagccacagaattgaaattagatccttagggacagaacagatggtggttaagaaatatggttagagttctggctccccgacttaccagtaatgttacaaatctcactgtctctcagttctgttaccactctctcatttggttgagagatctaagtgatcttttgaggtaacagtaactaccatgtgtacatgctttgagatctgtgcctttgttgttttctgaggagtttaacagcaagtcgttttagttctaagacatctgcaatgatagcatttcttgttctaaaaactcaagtctaattgtttctggaaaacatcatcatccactctttggtttggggattgttccttttcagcctgggaagtttttgttttgactgtctcttttgttttgtaaatgtggcatttggaaatttaatgaagcaatttaatttccatttgctaaagtagattgtcaaaggactaggaacaggcaagacaaagttaggatcccaggatgttgcctcacatatgatgtgattttgtttcccacacaaagaacagagagtttgtttttccataagatggtctgtggcaaagctctggtctcataccaggtcaatccagtgtcttcgtccaaatgactagtaatgggccaagaagatgacccacctagggacagggacagatcctcactgtgtccagacagagtcatccttactagatgtgttagcccacatcactggaaggcctcattttgtcttcaaccttttgaacacagtcactcaacctgaaaattcgaatttgtgaaggaaagtatggaaggaattcacctttaaataatcgagtattgcctggagagtccattgtaaaccagccaccacttattgaggtatctgatcataagacatacttccctgggtgttcccttcatgcgttgaccagaaactaacctttaagatgaggaaacctactatcatagaagtgaagtgatttgcccacagccacacaattgtgatgtaccacattatcgaagaactcctctttattccaaagccctgtcattgtggtaatctaccaggaggaaaagaatattttaaaaacaccttagagaaagttgaggtggtggtagaatggaggtggagccaatggcacctatcagtggaaaggtatttctcttcctgagaacagtgatgctcctagttgctaagccacagaagacatcctgcaaccatatcagagatgcatataccactctgttctaaaacatagaagaaagacatgaagcttgcaggcatgagttctgagcattgggtgggtttttctttcctaccgtcacctattacagtcaccatattgtagaaatattatgtagttttaggtcaaataagagatagtgctttagtcccaatgtgtcccactcacagaaaggtaacagaagccagcacaagttaagcactcttacctggtactgttctaagtgtctgcctgtattcaatccttaaggcctccttacatcttttacgggtaaggaaactgaggctcagagatgctgggtcattcaggtagagagtggtttcacttgcctgcacgtccagacaggctagcccctaatctgagcctttctcttccagctgctgctgtcattctgcacagacttgtccagtacttgctcacctcaggttctcacaaggttattatcacagttctggatagagcccagggttattaaatccttcctggatccaggttctcatttgaatattcatagaattccaagttgccaggctgccagccaaagtgcagctttctttaaagactgtaagtcctgcctctgtcccaccaccctccttctctctttttcttctgtcttactgatactcagagcagttcccccccaggcatacatttagtggggtgtctattgtagtggtgaaacaccatgaccaaaatcaagaagtccatcatccagggaagagggggtggagcaactcaaggacgaaatctgagggcaagaacccatgctaaggtcttagaggagttttgcttactcacttgctcttgatggcttgctcaaccagtgttcttatagcacccaggagaacaagcctaggggtgacactaccccgttgtaagatgggcctgcctgcatcaatcattagtcaagaaaatgccccacagaccaatcttatggagaccttttctcaattaagattcctctttcccagatgaccccagcttgtgtcaagttgacataaaaactggacagtgcagagcttctttcttcatctctgctcaaagaccctgatacatagacctgcttggatcctgggtgttcagcacatacatacttggttaatgatcacattccatattgtcttccttcccaccttccagctgagattctctgtatatccctggctgtcctggaacttactctgtagacctgcctctgcctctgcctctgcctctgcctctgcctctgcctctgcctctgcctctgcctctgcctctgcctctgcctctgcctctgcctctgcctctgcctctgcctctgcctctgcctctgcctctgcctctgcctctgcctctgcctctgcctctgcctctgcctctgcctctgcctctgcctctgcctctgcctctgcctctgcctctgcctctgcctctgcctctgcctctgcctctgcctctgcctctgcctctgcctctgcctcccaagtgctggaattaaaggagtaagtaaccaccgcatggttcagtccatatggtcttttcaattcaagcccaacaggaatagttaaaaattgaacgtagagaaactaatgaactagcaagccccttgagactgtggtaaaagtgtgttcatttacagtgcccccaaaaacattttcccccttaaatcccaaatctgtcccaaagagaaggttgtcacaggatttgggggtttggggttggggttggggtttgttctattctgttttgtttttctgcatctatcctacctggccctgagaatgttgtcttagttttcctaacctacagtcacacctcccaccccacttccctgcctcctgactcatgtggcaaatcaatgaatgtcaaatagacgcaactaatacagagaggtttcgcctgaggtgggaattatgcaggcagcataattggggggggggagcagagtgggggcggagcatgagctctgatcctccaggtctgtggcaaggcagacccagtgaaactaatacagtgtcagattttgcctttacaggaaaagatgtaaataagaagcaagagtgggtgtgctgtggacaccattgcacatgcctctgcctgctggctggccttcctaccattacctaagattctaagagcaggaggaagagaagggaactggtttctaggtaaactcacttttgcttggtttctgagttctgatgttcagtgacattcacacctcatgagtccttagttttgtcttagtcacagcagtccctctgcctcaacctcccaaactaggtttacaggagtggactcagctagcagcaggttttagcaggttcttttcaaaggctaggagctcacactaagttcatgaggctgactatgccatgctgtctctttgaggcatttcctattattcttctaatggatggaagtcccttgatggaaagaacctagtcctaatcacttctgcctcttcaccacatcttcttcagtgcctggtacagaagaaggccattgttcatgtttaggcaaatttccctaaggtgataccctagccacacaacctatccacagacatcttgaatttgcatttcaagactcaagaagagctgtgaccactccaaggtgtggttgagcagaagggcattactgtagatatgagagagagtacagccagaggcatctggaagagtccagagcagagacagaaaggaatacactgaacatggccagcagactgaacttggccatgagaagagaaggggagagagaagaactagggagaaagacagagagagtgccagcaaaggagatcaagaaagaggggtgagagagagggaccaagagggaaagacaaaagcaaggaccaagagagcagctggcccaaatggcctggttatatggtaatgagaagctgggggagggaagcccatgagctaaagaactttagagtagtgggtggggttggttgataagagccacaggtactgaccgaacctggaggacagcatgagctttggtgtgttaataggcaccaccagacccatttgtctcttaggacagtcatggggaatggctgctttggtcatggggatagccccccagaagttgggagagtggagtttcctttggacctgatgaagacctgtgaatctgttggctcttcttcctcttctaggaagcaggggttcatcttcatccccaaacagaggctctgaggttccaaagcaagaggcaggcctgactgggcacaggcagcctgtgcagttcctgtttccagcgctctctgatagactctgattgcttccataatgctgcacttgccatgggtgccgcgtgttgatgttcaggcatgggcacatcctgtttattcccatagctctgtgttctttaggactatgaagaatgaaagccagctaatcaacctcgtggcttcgcgaggatgcttagaaagactaaaatttccaaagggatttggtgttttcttgttgaaaatagattttttttcacataatgtatcctgattttagtttcccctccctctactcctcccagttcctccctagctcccctccaaaccagttccactccctttttgcttctcattagaaaacaagcaggcttctaaggaataataataaaagacaatttaatatgataaaaactaacacattggaagtggagaaaacacaaacagaaggaaaagaacccaagggaaggcacaagaatcagaaacccactcaggtgacccatgaaaacaccaaactgggagctatgatgtctaaaaaaaaggacctagcatagacccacgcagtctctgtgcaggctgccttgctctctgtgagttcgtatatgctttgatcgtgttgttgtaagagaaccttgttttcttggtgtcctccatcctctctggctcttaaactctccacctcctttgcaaaggatactcttaagtctagaagctaaaggtttgatggagacatcctgtttagagctgagtgttccaaggtgtctcggtccctgcatgatgtctggctgtcccatcagctgcaggagaaagctcctcttatgacggcttaacaaggcactgacctatgagcaccgcagaatgtcattaagagtcattgtattactatgtttgcaaaacaaacaaacaaacaaacaaacaaacaaactgctgtatttggttttaccttgggtccctgagctagctagtctcaggttcttggtcacccaagcagtgttgggtgtgggctccatctcatggagtgggccttaagtcagaccagatattggttggttactctcacaagctttatgccaccttggtactaatgtatcttgaaggtaggacaccattgccaatccaagggtctgtggctgggtttgtattgatatttctcttctggtaaggtgcagattaccttcatgtaccagacactagaatgtagggttctgtgaaggcaccagcttgacatccccaggttcagggagtggtgtaggtgttgtcttcagtaatggggccttgctggcagtttgtggagaactaacaacctatagtcttggcagcagcttgggttgtttggagattcccatggaacttttttggccaacaactcaattagatgtaactcaattccagggccagaagcttctagtgataagagttgtccatttggggctctgtctccccattatttggcgatttcagttagatcacctccgtatatgtatatattttaggatgcttctactgttttaggtttccatactcaccctcaaatggcccttaattttagctgtctctctccttattcctttcttctttcctccccatccccgtgtgttagttccccaatccatccatagctctctgctctatttatctctcctagtgagatctacttgtccctctagtcccttactctatacccgacctctgtgattctatggattggagcttgcttatcatttacttaacagataatatccacatagaagcaagtacataccatatttctctttctggtttggccatattcagaatgattttttttctagttccatctgtttagatttagtgttctcttttagttcttaagggatagatctgaggctggagagatggctcagtggttaagagcactggctgcttttttagaggtcataagttcaattcccagcaaccacatggtggctcacaaccatctgtaatgggatccaatagccttttcttgtatgtctgaagatagctacataaataaataaatctttgagagatgagagagagacagagagagagagagagagagagagagagagagagagagagagggagagagagagagagagagaacgtgcacgcagcaattaaaagacttgccttgcaacagtaagaacctgagtttggatccccagacccacataaagtgtgagcctacaagcccagaactcctatggtaggatgcagaaattacgacagaagaatcccagaagctcgcaggccaggtggtctgtcatacacataaagaagagaacccctgtctcaacaaggtgggagatgaggagcaaagctcagagttgccctctgacctcccaggcttgcaaggcacatgtgcacccatacccacacaaactcacacgcgcactcatacacagacatacatattgtacacagacagacaggcagagaaaatttttaacgagtaccaggggtgatatatgctaataaagccaagtgccaaattttagtttacattttaagaacctctgtcccctggcctgggcacctccttgtatcccccagcttactgtcctacttctggaagaggaaaatggtagtgccatggagatcacctcaagatgtccacttactctagccaagaaggaatgcttccacaggtttgagggtggcctgggaatctttattttactaagctgcccagctggctgtgtgggacaagcgctcagaccttctcaaatcactgttgtagaacgtgtttctaaactaacaggccttcttctggccatgaacgctcctttccttctctcccctatgacctgtgctgctctctggaaatgagtgctcataaagcccagtttaattgttgagtggtgcctcctctttcaaacgactggtccatgcccagtgggaacagtctggacagctgaggtctctcccctttagcactgtgggctcgctgatactttattacatgcattattaccgcatcgattgtgggaatggcagcgacatccctggccttttctgactagatgctaatagcacatactcagccccgccttgagacaaccaaacatgtctccagacactgtggcatgtccctgaaggggcaaaactacccactactgagaacctctgggctaggctgatgacgtcagccccctttgataaggctttcccatcatgcctgtcgatgaaatgggatctgttcctgtcccacggctgatgctaactgaccagaaactcgggccagaggtgagaagtgtgctacactagaatttattcatggctctcagggtagctaacctggcctacatagcagagaacaataagaggccctgtgtcaaacaaggtgaacagcaaagactgacaaacaagcaaaccagagctgcactctgattttcacatgcacactgtgaaacactctgcttccctcctccctctctctctctctcccccccccactctctctctctctctctctctcacacacacaaacacacacacacacacacaaacacaaacactctttttttaaagcaaaataggagtaaaatgttagctgtgtccaagtgaaggatccagcaacatagaagaattttagacagttccattttgttccagatgctccagagaaaaccgtgacctagactttgctccatcagcaaaagctgaatgaaggaggaagccaatcttacaccttcagtgggctgtagcaagcccccacccttccccttcattcatttgacacccttccttctgacaccagtgtggtgtcagagagtaagataaaggtagagagtggaatctctcactacctcctggaaggctatacctattggctgagtggaaacaaaaacttgacatgcacagtggctccagacagggggttatccatggaaaccactgcactactcaccccttccaagtaacaaggaggctgcccattgagagtccatgaggaccacataaggaccctgagcttcacttggaagcactgagttggccacactccgttctcctgatagaagagtgtcaaagaaagcaagctgaatcgaaggtttgagtaagatcccatacctcataatgaggttttaatttcaacataatccatcaggaatatcccacagtgagttatgaagagacaagaaaggcaacattagaataacagaagagtaagaactgacagtggttacgaagtggccattataaaaacacttcagtgagaaattataaacatacatcccagatgtgagcagatgcaaaatctcatcgaatgtatggataatagaaaaattcctgaggacattttagaactgaaaaaataaaacaaacaaacttcaccagctgagctcatcacccaaacagaggggccagacaaaaacgaccacgcccttcaaaatgcatatagaaaggctagaacctaagaagacagactgcagagacttacacagagccttggggacctgtggggccatcacagaaggtgtgacaatcctgtcgtcatagtcccagacaggagagagatgatagagctaaaaaccactcaagctaccatagttcccctttacctgccaggacaagttccgagatcccttgtgcacttgaaattgtggataatttcaaaccatgtataccaatggtgaaatactatgacaccagcctgataactcaaatgagaccactatacgactaatgggcaggtagcagatagagagacacaccccttgaaaaagttaagcaggcagatctctatagaagtcgaccagccagcattagatcagggctctcccactgctttgtttggatgctctcagctctctgtagtcagagtgggccctctcagctagaaatcagaggcatgccccatggtatgccctgaagactgaacaagattggagatctccacagtgtgggtcatacgtactgtatcagaagggatagtggtggccacttaggcaggggagagcccagctccaagcctgggacagcattccaaacatgggcaggtcattttgatttgtttatctcagccaacctgattttaatgcctcctggtgcatttctgtatgatccccagatggtttaaggttttgccttggatgtcataataggactgaaggacagacagcagaagatggaagagctgtccatatccttgcctggcctatggttgtaaatcagttcagaggcccacaagttctgtgtgtgtgctagtcagctttctgtcgctgtgacaaaatgcctgaggaaatcgactttaaaagacaaaaaaacgtttggcttctgaattccttggttccaggccatggtccctggggtcagatgtttatgcgccatggaagggctgggtgggtatcctgctgaggaatgtggtggaagagagctaatcacctctcagagggggaacggtgtcagtgaactaacttcttccaaccagcctcccacctcctaaagactgcaccgcctcccaacagcttcacagactggtcacaaagactaacactcagcctttgagagacatttcccagccaggaggacacaaagcaagcagctggggacgaacacaaagggggcagggaaacctgaggaaacacttccgcataaacgcataaaccggaagagctgcttgagagggaagccctggctcctgttgacttcctttcagtttggcctgacgctgctgcaatgaatgtttacccacccccaccccgcaccctcactgcacccaggaatcagagactgaggctccagaattaattgttaagagcactctgctctgaagcctggctcacaccttccaaaactgaaggttgttcccgagtgcacttggctctaccccaagtgtactccccaggcctccctgaactcctgtgggcagctgggaacttgcctggcctggtggggctgaaagacgaattgctgtctcaagtttcctgtatggcttcctcccttccatggctcacttggttctaacttgctctatcattgaaaacttcttcttctgggttccagaaatctgtggcactgagccaacaaggggcttagaacttacctttgtggaggcttaaaatttgagctctgtaaccaaagggtctaaatttagttgaaagcaactaacattaaaagggggaggggcaactttgtgaatactcattactgtttacagatttgtatacttgggagtttctgaaaataattttaatatcatcatactcagtcacctcctgccccctctttctcttgtcccacttaccccaacctgattttccacctggtcccctcttacccaaggcagaagcctgggaggtacccacatggtgtattcttacctcccacaccctccactgtctctctctaatataagccatcacataaatcttgcctcggctgggagtttttcatttcttcctcccatatatcttcctcctggggtcagggagatctttaaagacataggctctctcttgcctaagtccttctaatctccctaggaacacccccacttgtaccacttatataccctataagcatctgtcttcccactttggcaaagccccctttgcgatctgatagcttctgtccttgtctgccatgcagagcacctcttctgggctcctcaaaacccagtcctttctcacacacagtagggagaagcagtccccagtgaaagccacactgctctcattggtcattattcagagctctgtcctgggcgttccatgggatcttcagttccagcacaattcccaaaggatgtctccatgttatcctggttttacagatgaaggttggtttacagcaggggttgagagttcagtgagctgcctcaaaacacatagggcatattataggattggtgtaagaacttcagtctccctgatggtttgtgtgtccatcagttcagcattctactgagtgccttgggtggtgcctgtgtggacatcatgtgtgtggagtcagacatcttgactcctcgggcatcaataccatacactccattcatcaaaaatgatctaatgagcaactttcaatatacacagagctgtgtggccactacccaattttagaaggttcttatcactccagaaagaaactcctgtcattataacttgattccttccatacttgctgcctcagcccagctcctgaaggccaatgtgcgctctctctctctctctctctctctctctccacctttgtagacctgtccattctggatgtcacagaaatggaatcagaccatatggagagtctttcgtgactggcttatttcacttgccacagcattcttgatgtctctacacgttgttacatgtatcggtgctttgttccttttgccaaagagcatggcactgtgtgtgtagatagaccatacactggcagatgctttgattatggagaacagtgcagccaagaacactacatacacctgtagcttacttaattacttccatccccgttagctcccaaatgaatgagactcaaactgtgatttatttgtttagcttgggcacagatgactgggggaaattacccctcgtctatttttctaataactacttctccagctgtgctcccccaaatgcctgctgcttttctctctcccaggctaggtctgctccatccatctgtccccagagtccatttcactcagacatgtactccttcctggttcatcatatctaatggagacctcctgttcccgccctttttctttcctccttcttccttcctcctttgttcttctcctctccactttgcctcacctgctacctgcagcccggcaactcaaacttcacacattctattctcccccaaaactgtctgtagccacttttatttaaccaatagctttacacttgggagcaaagtttgcatagcattacttcatgtacttgaggaactgctgctagtcagggacaaccagatttgggggtggggcggggcctgaggggacagtatttaacatttgaatatatagcagcaccagaccagcccccagcatacagcttcgtgtagcagaggcttggatttgaacctgtttcttccaaaacctatcccaagcacttcttaacagttcccacggcacaaatgatagtcctatggcccggctggcagaaactagaaggatagcgttcatgatcctgtatcctgccccagaggcttcctggcaaccctagctgtctctgaggcctgggtgtgagaaagcagaggatgatcgccagcatttttgctgtcctccctgcaggagcaggcagagagagaagtcccaggcctttggacctcagcggaccaaacccaccgggttctgagatgcacataaaagcctgggtagcatccaaaatggaaggttacatatcacatgctttaatcttagtcacttgtggctctttcctgagccggttacctccttccctggtttcttcaggacaaagaaaatattgtaacaccatcagttgttggtagagagacggacatacaagcaccagatcctagtgatctgtcagttataatgaggggtctgtcctttaactacagccttaatgcatgcgctgactcagggagccagccctattggatgctccgtccactagttgctgaataacattttctcctgccttttaaaacagaactcaaactgatgctttttctcctgtctaacttcttatcccttgaagtctactcgagtttgggagaaaggattgtgtgttggtgcattccaagtaaagccgctggcatcactgaggtgctcagagaaggaggtagcaaaaagcaggcaggcagccagcaggatggggatgggggtgggaggtgggtactgcagctctcacctggctgcctggtcctggcagtgaatcctctgccaagttggcagggtggagatggcaccgtacactaagccagaggggacagaaaagcactctcagcactcgagtcccacaagccgaggtcacagtaacaaatggtgactctggtagagaactcgacagtcagcgacagctggagcagatggcatttgtcctcagctcacaaagcacaggggcttgtcacttatttctcagccacgccttcagcacacacacacacacacacacacacacacacacacacacacacacccttactctgccctggcctcatttcagcctcattgccagctgctgccatttgtgggagcaaaacatgggtgtcccaagctgctgggttcttccctctctgtcccttcacacacacccccatttgtcacccattcacacttaaccaaactctagctaattaaagctcacaagcagttcctttcctgaaacaatgggcttctcctcgggcagcaaatcctacagctaattcagacacttccaccagaaaatgcttcctcctcccttagctttgtcatcctaggtcttccatctctgcgatcaagtcatcccaagctgccctggggtggggcatctccctttaagactctcccaaacaggagtatcctgtcttccttctttgcttcctccaaatctgaatattgactggatctgtcctgtctggttctctacagctagaaagaagcatcctggagctcgcatcttactctgctggctctgagaggctctgatgatcctggatactttccagtggttctcagcctgtgggtctcaaattccctgggggtcgaatgaccttcccacagagatcacacatcagatagtttgcatatcggatatttgcattatgatttataacagtagcaaaattacagttatgaagtagcaatgaaacacttttgtggttggggtcatcacagcatgagggaactatgttaaagggttgcagtgttaggaaggttgagagccactgctctgagtggccttgagcccctcagagtcctgtatagcagatgctgaggctaagggatcgccctaccagctatggtttgaatgtgactcacaaaggcccaagagccaagccttagtccccagtatgatgttttgagacaatataacctttaaggggttcggtacaaagtaactaggttataggtctctatcctcatttaaaaaaaaaaattaatgcaggccttgcaggatgcattagttctcacagaagcgggttgttataaagtgagtccaccccaccagctggaccccttctacatgcagccatttacccattctcctctccagccatgttgtgatgcagacagagggaccctcaccagaggcccaacaggcatagcaacctggctctcctgactctaaacctatgaggcaaataaaccttttttttgtaaagtatccagccttgggcgttttgttataacaacagaaagtgaactaagacaccatctaattagaccccaggtccaaagcagatcagagcctgccctggatggtccctaagtaggtaccaaaagcacttgggagcttctagttcctttccatgccatgccttcctgtgcaaatgtgtttcagagataaggcagaaaagcaagagccaacaatgctactggaatggttgggccatgagaacgaatgaacgaacaactgcctttagctcagctccttcccacttccctctgtctcttggatttgctcacatctctacgtttctcagctcaaaggaatagcatacagtctttgatcctggataccctcctaggtctcttcctggtctatttttgggaagcagtaaatagattataaggaatttcgttagagtcctgttctgattatttggggattatattcagaaagcaattcatttctttgctcctttgatttcttgggttcaccacaggacaacttttctctcctggtgcagggtgacagataagacacactccgtcattcatcccattggaaatggacccgtgttcttgattctggtggtcttatttcctgaggcccctggaatggctagcatgcagcactggctatgtcttcccactacacagtcatctcaagaccaaagacgctgataaagagtaaattctagcatgtcagaccaggaacaggggtgacggagcctgaagtctctgacgcttccgtgaagcaggttctggatcctgaggatttcgtggttggatattctccttgctagcctccctctgaacatggctgaccaggcccagggaccaggggaagggcagactatgggcctctggtcccaatgagtttcacactgcctgccttgaagtgtaaaggcaggtgccagctcccagcctttcagagcatcgcctgactcttttatgagattacaggccctttcatcttgcctttggcctggttttcctccttcctagcaaggctccaaagacaagaacaaggagggggtgctcattcatagcagagtccccgctgggcacggtgacctggcctatgcatcttccaaccatgtgctttttagcagagcaagccaggaaggcgcgcagaggacagggttaagaggggtctttcccctggcatcgggaggaagttgcattgcatcctgggaacgctctgatcatgcttttgctttgtgtcttccacttcaattcagtggaaagcggctttagggccttttctttctctttttcttctttccctagaagggctcttttaaggccagggctgagaacacaacacaccccttgcgtccctgttttctgagcgcaagaacacgcgccgccttcgttcttttctgtgtttgttcgtcgtcttgcttaacaagttggcttgccttcaaaagcacaaacggggtttcctccccatgttgctctcaatgaagcaccaggagctctgccctctctgaaatcccaatccatcccttctacctggctgtcctgtcttttagctattctccgcgcagcgtccctccgctggcttgtggttccaacatctagaaacaggacagcagtgaaacagaatccttgtgcttggcatccatgcttcttccttccactcgttttggggacacacacacacacacacacacacacacacacacacaccagctccagctccagctccaccactgtcccctcagacccaccctccccaggctgtgcaccccagtccagcagttgctttcgcgtctatctttatgcttcagccatagcacttccccaaacggggcagcctttcttttcaagatcttctgtttcacaaggccaaccctttatctctgcgcagcctttgcctctgtaccttctggccagaaacaccctgggtctgcactaagagcactcaccccatgccatgtgccctgggtctgcaataacagcattcaccccacaccattatcatcaggaactatgctttaggaatgtccagcctcaggctccaagttgggtccctgtgcatggaacttgtcccacccaccacataaggcctctggactctgatcatatttagcccctggtccttggagaactctgcaggtgtccctccttctagagagccaccaaatcatcacctcctaatccaaccaaaataaggacacttagactcctgcccctgccccagaaaccacacaatatctacaccatactctgatgcaacccacgacacttagcacacctcagtccagagactctactatagtatggagaagctttgtcttatcccatacctgccccatgctgtgatctacatcagtctccagaattctgttgagacagctctgccagactcagacatgaacccttgggacctgggtcaaagggtgacctgataaagatcaggcagcaagccattgtcagacctgtatgcccatctgatggctaaaacccctgtgtactcaagtcaggttactgcctcgtctaaggatgtgttgcttcctccagacaacccttggggccatagacatcacaaaattacagtcctgcctgtcctaccacaattctcaatgtgtcctgacatgtctgaatccagaaacaagcataacatagaccaaggtggcacacacaccattgtcctttccttagatggcgcgcgcgcgcgcacacacacacacacacacacacacacacacacacacacaccattgtcctttccttgaccagtgcagacatcaataatcgatcacaacacagattctgcctaggagagccaaggaatccacacacatagactctacctccactctgagactttccagatcccctcaaataactttatagtgtttttagggtttttgttgttgttgttgttgttgtttgttttctcatttcaaggccctcaggatttggctactcctgcctgagctcatctagcttgtaataataaaacttatagccaagatttaagctcttctcttccttgacccagagactgttattctctgtgtctcttattaagctcacaggttattttaccctcactgtcatgtgaagtcagtaccattattggcctcatatgacaaatgaggaaatggagacctaggaattgttctcaagttagagagtatatcctacctacctcgtcatttccatcatgtagggaccttttttattagccgcccctccccaagctatttgttgatgactgcagtgggccctgagacaaaaggagagtctagcactgtgctcgaggtggccaatatttattttgataacttattttgagggctatgtacagggagagatggaagaatagagcccatctgaacaatgggctgttgaattggacactgaagcaatgtgtaaccagggaaataggaaagacagagagctgaagcatgcgtgcctcttactcctcccctggtggaacctccctcctccctcctccctcctctatcttcctctctcctcccttatccctcctccctccctcctcagcaagcctatgctcatctgacagaatcaaagtctgctgaaaggtccgaaagccttcctcccgggctgtgggcacccacgcccatnnnnnnnnnnnnnnnnnnnngccacccacggcccatcacagcagtccaggcaggacaggccctcacccaccaggctctcctgagtctcattgctcctgccaagacagcttcttccagcctgcaaggagtatcggagtcactgcaggcatggccccatatatgtttgcctttcaacatgatgaatttcaggttgtacagcttatgtttatacatacagcccccgcagccttgggttctatatctatggcttcaacccaccacagtcaagaatacacaaaagaaaatatccattgtagtgactctatgcagatctattttcttgtcattctccaaacatatattataaaacattttacataatctttacagggcatgcggcttaataagcagcacagagatcattttaaagtgctaggaggtaatgtgtaggttctatacaaacacgatacaacttcatataagggactgaatcattgatactctttgatgtctgtcagggattctagaaccagttgtccccaatagcaccaattttttcagtttcaataactctttttacaaaagttggaatcatatgtgtttgtgtgcatatatatatatatatatatatatatatatatatacactatgtatatgtatatatatgcacatatatgtatataactatggcacatagctgtagtttttgtcttttttccttaagattcgagttgcatataataaaacatgctttttcaagtgcaattctacagattttaacaaatgcatgttattgaagtctcactaccaaaatcaagatgtagaactactctggctctctcactccactcccgatacacccttgcccaccgtgcagtcagccctgatcctcgacctccagaacccactgactcttctctctgtactgtgcctcgctctcagtcacataactggggtcccagcgtgctgcagcttcagttttcacttggcgttatgtgcataggtccccgtaccgttacatattcttcaaaggtattactttttaatgactgcccatctctctccgcactgcatgccctccagttccccacagcagtctctctcagagaatagatatgagagagaggcgggaggtcatgctggaaagaacaagggcaggtttgatctgattactgctcatcacctttgatgggagatgctggctctcccaccatcagccacggtggatgagcaacacggaagccaagtggacaataacaagctccccgtgacagtgactgccccaggctcatgttattggagccatggctgacacgggcaccttctggactcacgggtggggttcttgttaaggagataaaggaggattgcttctcctcccttcagacgaccgggaggatggcaggagataactgcctcagagagccgaccacagagccaggcacacggggtttgttctcctttctcctgtcctcccaaaccccagccaccaccttctcctggtgtcttgacccacagactgtaagtactctcaccacaaaagagagaaaaaaaatacagtaaccataggagggattggcttcatagcatcttgtctgtgtccaaacaccacagtgtacactgcaaatacatatgatatttatttgccaactacatctcaagaaagctggggtgaggggcagagagacaagttgagctgcctcctacactctcaagagggttcgaagacaggggacgggagggagggagaacttcaggaaagaacaagtccatgataggttaggcgtctagatagatttcccccatggatataaaaggcatatgctcagttcataatagaagcagggagttggggtaataacagctgtttctcctaaaattgtccaatgcctcttctgcattggctgagggcattggagttacggaaaccgttccccatggccaccggcattgtcttctccctctccctggtctcagaattctcccagcaaagcagaaccggtatcctagtgtgttgctatggaaagaatggtaacatcacttgggagatggtgaaaaaagggaggtgggggtgaaggaggaagaaaagaagggaaaaaaaacggaacagacaggatttctttttaagtgttactgaactggaagaaacgtggaaaactacatgtacccatgtccaaagtcagcgggcgttagggtatgtccctgtcctgcgggaaagtcttcatggaacattttggtacccattgctcccacgcaattctgggatgctgttagatttccagattttctgtttgctaaatggaccgtgcagtggccattttgagaaatagaatcctattccctgtgtcttttttttttttttgaggggggaggggttggttggttggttttattttgttttaagccagggctcacatagcccaggttgccctcaaactcactatgaggtcaagcatcactttgaacttctgatcttcctgtccgtcctgagtgatggactttcaatcataagcctccactcatggcttatacagaggtggggattaaactcagcatgttaggcaagcaccctaccaacaaaaccgctttcctagctcttggggatatctttaaataaccagattcatcttcctttttttgttctctctcatttctcacatcggtttaactcaacttcaacacccatgacttgcttcagaaagttcagcttagagcctgggttcaaatcccagccttgctcagccttgctcggttctggccctctgtgcaaattagcagatacttctaagcttctgtatgcatgaactattttcaaagactgtgaagttcagggatgacatgtgaccgggtagcatcggggcctgcacagagctgtccttggggactgtgggggtcatcgtgtctttcatcacacagacaaggccaaccaggtagccccatcagatgtgcactcaggctcagtcattcctccgcatctgttaggggtcgcatgtgagatgcctgcattgagtcacccgtttgaacagtggtccctggtgtttgcggcactgtttggagaggtttggaatctttgggatgggagacacagctggcagagttaggccactaaggataggtctaggacccttgcaaagcttctgcctctctctgttctcctttacaccctctgctcaggtggtcagcacctccataatgctcttgtttcctcactacttctcctggaacctagctagctctaaaacaagctgccgcccacccccctcctttctcctggtccaccaggagaaagctgacactaagtggccgttgcaatatatgttaaggaaactcctcagcaacagtggctacaagtcagacagcctcgcctctgagaacctggatttgtcagagaaagcttggtctcctttgttctctgccttgtctgcagtgtctagactagaggtctggctgttgcgtcaccacaagtatctggcagtaaggaggggtgtgcagagagaccacgagacacagtgtgtggttcaataagagccctggaattgtgtcatgagagatcaagggtctgagagaaggactggaatgagattcaagggagaataaggagccaccatttgtcacttctgaaaaaaaagagtcaggggatatagagacttggagaagaggtgcacaggacagccagagtgggaaagcatgttgtatgatttagatacaaggtcacgagttggaattacatccttgttgtgagttattaaggggagcaggaacttaatctgactgtggcctttagaggtgggctttggagagtgattaaattggaaaggtcattagagtagagccctcgtgattggatcctggagggtttataaaaagaggagggaacagaagagcctcaaccgctgtacatgcacctcctgtgagtctctgcatcacttcaggacttggccactgagaaggtcatcactacagctgggcaaggtgatgcaaacctgtaatcagagcacttgggaggtagaggcaggaaggtcacgagttcaatgatagtgacatagtgacatgagttcaaaagtttgaactcttggagactgtgtctcaaaacacacagagaggaagccagggaggtagggaagaagaaggagagagagagagagggaggaaaatgctgtcaccaaatgtggctcccttgaccttggatccccagaactgtgacccccaaatctcttttcgttagaaagcacgtggatattttgtcatagtaatactagtaataaaattaaaaaaaaaaaaaaacagactaactcaccatgaaaggaagcaatgttagtctacccctgtaatctagtaagacgtgagcatggcttgacctcatatggaaccatctagaaggttgtgcataaataaccgagcaaggagggcatattccaagtaattctgtgttgtcatgctaagtgacagagagcttggggtccccacagagcaagaaaatcgggcggtgattttacttaggataaagtcagggcttgttcaaaggatcccatacttctttgttgtcttattaataagttgacggcatgtctgctatatgccaggttacatcacatactttacctcaatcaaccagagtatttgactcccacagcaatcttgtgagtattcatttcttgttccccttgtggagcagatgagaaaatctggatacccttttgtctctgacctgcttttttcctcaaacgagctagctgtcacaatgcttttctagcttctttctgtgactccaatccaatgacagaaaacctgtctcccccttccctccctnnnnnnnnnnnnnnnnnnnnnnnnnnnnnnnnnnnnnnnnnnnnnnnnnnnnnnnnnnnnnnnnnnnnnnnnnnnnnnnnnnnnnnnnnnnnnnnnnnnnnnnnnnnnnnnnnnnnnnnnnnnnnnnnnnnnnnnnnnnnnnnnnnnnnnnnnnnnnnnnnnnnnnnnnnnnnnnnnnnnnnnnnnnnnnnnnnnnnnnnnnnnnnnnnnnnnnnnnnnnnnnnnnnnnnnnnnnnnnnnnnnnnnnnnnnnnnnnnnnnnnnnnnnnnnnnnnnnnnnnnnnnnnnnnnnnnnnnnnnnnnnnnnnnnnnnnnnnnnnnnnnnnnnnnnnnnnnnnnnnnnnnnnnnnnnnnnnnnnncaaaaagaattatgcaggagtggactgcctgccggaggttctcttccaagtttaaatgcaaagcatctcttcctagaatgcatccacactggccaggcaggggaagaattctgatgatggtgaccataaaaggggggcttttccttcctgctgaatccaagcatgttgctgaaaaccctcgtgtgtttaggaatagagaggacaagagggggctcaaataggaaagaatgcatgcatgtaccctcactcccaggccttagtgcagctccaggcttgatccattcaccaagacatccattcagcaaagcccagtaatgccatcacccacctagcccatagttggtccaggtgccatcatagacaccccctgcttaccaacctggtagctgcttttggttgggtcagtccaactctgtctttcaataaactgccagaggtcacctgccaaaagccccttggcctatgtacctatttgtgagcttagactcctcagattctccaggctcctcatttaaaatgagctctgaatcaagtaagagaccctgccttatttaaaaaaaaaaaaaaaaaaagccagttgaggcacggtagcggtggcacacacctttaatctcagcccttgggaggcaaaggcaggtgaatctttgtgactttgagaccagcctgatcaacagggtgagttccaggacagccagggctgtccagagtagccccgtggaaataaaaaaataataataataataactgtaacataaaaatgggagttgaagaaggaataaaaagaaagagggaaggagtgagcaggaggaggcagcatcacctctgcacccaggatctcatttgttcctctccagagtcctgagacatggtcagcttagatgcagttctgtctctaacaagtcttcaagcaaatccctccaccaccaccccaagcctccgactaacaggagtcgatagccaggggcacccagctatgcacccggtcattgctttcttgttgaagcctaggaggttccagggctcctatcctcactctgtaggcatctcttgaagatccccaagaagtccactcctgaacccgagactctgatgtcacaggtctggaagtgtcttctgaatacctgggtatattacaggtgtgctctccaatccccaaagatctttctggagaaacaatgaacgggagaggacggggtatatgtaagtcagagcccaagacagatgaggcagaaggtccagagaagaggcagcacggagaacagcaggcatgggaaaagagatggagaagactcaggaggctagcttagagactgagggaacagggcaagctagggcacatctctgcgaaaactgtctccctaaaacgcagacagagcaaggcacccactgtccctactgaggcagaatgtggaggctaacgtgacagacttcgaccctgtggctctggtcaaacagggttgagaatgctagctctctgctcaataggaggaagcaatggtggtatcaccatggctggtgggagcctctcctctcccctcccctnnnnnnnnnnnnnnnnnnnnnnnnnnnnnnnnnnnnnnnnnnnnnnnnnnnnnnnnnnnnnnnnnnnnnnnnnnnnnnnnnnnnnnnnnnnnnnnnnnnnnnnnnnnnnnnnnnnnnnnnnnnnnnnnnnnnnnnnnnnnnnnnnnnnnnnnnnnnnnnnnnnnnnnnnnnnnnnnnnnnnnnnnnnnnnnnnnnnnnnnnnnnnnnnnnnnnnnnnnnnnnnnnnnnnnnnnnnnnnnnnnnnnnnnnnnnnnnnnnnnnnnnnnnnnnnnnnnnnnnnnnnnnnnnnnnnctcctctcctctcctctcctctcctctcctctcctctcctctcctctcctctgcctagagtctggagaaggtgcttcttcaggcgagcaaggctgcaaaaccatcataggctgttattgggttcagcatacctttgggctcatttccgtggacacagaatagccgcttaagtgtagtggctcaaaaacccttgtgggcgtggagtgggaagttgagggtcagatacactacactcacgtcaaggtgaggcttctgagggccagtggggagtccttcctgcctcttctgtctactagggacccggttgcattctttagcttgcaagaccagtttcaaaccatgggaggaaattgtgttcccaaaatataagttgctcccatggtcgattctccttcctctcctctttcttaccccctcctccacactcactgttaattgtacctccctctgtccttctcagaaggacatttgtggccatatataggacccacctatgtaatccagaacagcccacctctctcaggagcctcagtcacattgccaaagcctcttttccatacaagttaagattcccaagttccagagcttagaacctagatatcttcgggagccatttttcaggcccccatccctctgggtccttggcaaagcattatgagatgggaacacggcttgtggttgtagttcaaatctacgtaggttttgctattgaatgaatggctttgtggaggacattcaatccaagaataagtgtaaaccctgggccttgatcctgagtctttgagatgaagggggagataaaagggtttgggagaaagctgtgggttcgggaatgcagaggatccgctggagggagggagagatctgacagacagaatctaacagctgctgaaaagccctgtctcaccctgacgcgtgcctggggagcggagaaagcacactgctctctggctccaggaagatggagtgtgtgccgatcccccgcaaggagggaaatgaaaaggttacactgggattgtcaatataacaaatcccaggagcgtctcggcctctctaaatgttttgatagcagaatttgatggcctgtaaatcagagcaggcctgtcttaaacatttgatcgtgccttatttatttatgtatgtgacacatgcaactagaattgattccctctcctttcagtcgcagggagattttttttttttttttttttttttgctcctgctttaaaaacacatcactcctctcctggccctgggggtggaggtgtcttggacacaatggtaactgctaggatgcttcctacacagaatgctatgccttggggagaaaatgatcaggaattagctgcttcaaaaatatgacttcatcgttgggttgtttctttctttctttctttttttaaataagattattgttgagagaaaatgagagggtaagggtgttcagtgcagagcagtggcagacacacaacagggcagtttcctttgaatgtggaggagtcaaaagccacctggacctctccctaggggttcgggttaacctcgcctttgtcatgcccttcaacagacataacagactgtgtttgcttcgtgggtatggaagccagctgcagagcatctcaagtacccagtgttctgatgcaggtgcttatctgcaagcctgggatgtctccctcctctgtgtaacaaactccataggccaggactcttgcatctcatttctgagtgtctgaagcagactctgatgtagtgtacttgacaataacatgggactgagaagaatgaatgggacgtgtgtgtgtgtgtgtgtgtgtgtgggtgtgtgtgtgtgtgtgtgtccgtgtacaggtcaagggtcaatgctggatatcattcttgatctaactccacctgcttttttgagaatctagaactcgtcaattggttagattggaaccccagagacctgcctgtctctgctttcccagagctggaagtacaggtatacttggtcacgtagtcacaggggatcccagctgatccccatgctccacagcaagcacattgctaaccaacccagctccacagtcccaggttattgctttcagattagctgtaggagcccaactcaaccaagccaactcaattccagcgtgtcttcctgcagccatactgtgccatcctgccatccagtgcctggcattctgccttctactctttggtgaggttgttatgccttgctttccctgactccgcgtcctcctcccagttgcccatcgtgcccctcaggagtaccatatcccaccctagtatcatctcagagagctgggctgcttctagcctccactgtatcaaggaacatcaccgcttcacaggacagagctggcttctgtcttagttagggttttactgctgtgaacagacaccatgaccaaggcaagtcttataaaaaacaacatttaattggggctggcttacaggttcagaggttcagtccattatcatcaaggtgagagcatggcagtatcctggcaggcatggcacaggaggagctgagagctctatgtcttcatccaaaggctgctagtggaagactgacttccaggcaactagggtgaggatcttatacccacacccacagtgacacacccattccaaccaggtcacacctatttcaacaaggccacaccttcagatgatgccactccctggtgcaaggatatacaaaccatcacagcttctgtccaaccagcagatgccaagagatgccctttgtctcgaccttcagcatgaccgatgcttaggaatgcaggtccctaggccgtgctcaaaaatgtttgggattgattggtttggactgagtctcaagaactggcagtttttcatcccccacctccaggtacagtgtgattgtgcaacagacgatttgctgacctacccataaaattcaagcatagacttaagatagactggaaagaagtcagaaaattaagggatgaactcaggatcaccactggcctactgacagcaattcctatcacgtgggtgagagaaatggtagtaaagacagagaaagatgaatgagttggaaactggagcttagagacaaatccaggaccactaatgtctgcatcgaatcccacccccaccccccatgccagcattgtttcccccaagacacctactggtcagaaaaccttgggatagatggtaatgttgtgactttaaaacacaaaggagcaatgtctattcccttaggaaggatctaccacccttgatgaactgtagccccaacttctaagagctctgtcagaaaatccagtggagctaaaagcatccttcttgactttgacacctctgggagaggctccctgtcaaagcttccagacaaccctgttatttcctttgtcagcctccgtgcaagtccctgaaaacgagagatggctcccacgaaggtcccaggtagggtctcattgagctctccctggcttctgatcatccacaccccaaacgggttttggcagagcctctggcctctgcctgagtcccctcatactggaaacctgcatagaaggtcctcccgcagggatagctccctccctctggtaccttccttcagaggacaagaagctagacatgaccatcgagctgatggtcatgctctacatggcttcccatcagccatgtagagcagaatcttctgggctgctccgagacttttgcttttccttccttgggaacttcaggccacaaatagagaaaaatcaggaaatgccgccaccgtgactcaggacctgagagtaaggatccgctccacgtgtactgaccataatccgatctttgaaagattcctacacagtttgtagataaagtctgtgtcccgacactattgctctgagccattgaccacgctcctttatctctctgagcctcagagcccacgtaaagtcttggagaaatgaaactctgtctttggcatatactacataatgagtatctactgtccttcactagagaattgagcatggaagaatctagtggtgcctgcttcagagagcaacaccgaatgggagaaagttctaggtgaaagagtgaagctttctcctcaactactcaaagaagcacgggagcttggagaaaaatgtctcacagccacctacctggctcctgactgatttggctttgttaggatgactgatggatcacttgttgggtctcgagggccttaccttcaacgactatcccccctcttcctgactcccctggccccaaagttgtctcttctgcctcttggaccctccctgtctaaaaggctctgaccctccattgcctgaaacatcaaccttccgctccttagtgccgctgtgcagcccccaagcctgcatctgctctcagggcttagccttgtcaagcccgggaggcacctttcttgttttcaggaggaggattacggtcctcagttcagatgagctgtcattttccttccctgcacccttccacctttgaactcctgctcactaggggaggctatatggtatggggtcagataacatctgttcaaatcccagctctgccaagaaatggctgtatgttctcagtcaagactcgcgcactcgctggtcttagcgttcccatgggcgggcgttggagttaatcatagctactttgcagaggcatcataaagattcacccaggcggtgtggagacttagcatcagcaggtcacctgcctcacgagatgaaagaggaagaggcttcgtggttcaaagcttccatccacgctttgtgctccgttgtcatcttctcatggagggaggttacccccatcctgtacccgccccttccagctcccttctttcacatggtgacctcaactcactgctcacagagaaccttggtccctgaacccatgcctgaccctgacaggtgcctggtcagtctgcccattcacaaatcacttctgtgccaccgaagggcttccagatggtgggcagggcctggctccagtgttaatgcggtaaactgtgctcagaccccctagactcacaggttgaggttctaatagccctaatagtgtggagagacgctggatgaaggtgattagtgttgagttgttgtggtgggccctaacccagtgtggaggtgcccttctgtgaagggcagttaaccctgtaaacaactctaatgagattcactgagtttctcctcctttcctctcaccccctcctccccccacagaggcaaggacagttcactgttttttttttttttgaagtgaagcaatatcagtgtattggaggtatgtctgtgcccagtccaagcccttagagacaccaagaccacaactcacagctgttctatcggggtactggccattcattccagatagaactctgtatctcaatgtcttttatccattcatttactcatttctattttttataagatttggttttctttctgtgcatgcatgtgagcctgcacgtgcgtgtatatgcaccgcatgcatgtcggggaaccacaggatggaaaggatattggattccctggaacaggagtgtacagtgtttgtgagccaccatgaggatgctggccactgaagctgggtcctctgagacagcagtaaacccttttaacttctgagccgtcaggtctaccctccagcctctgacttgtttctattcttgcctgctttgacccagtgcatctcaggctttgctcggaacactttagcttctgtgccagtgagtaccaggctgcaaggtgacaaccttgaccatggctcacatgcccagacagatacccccaagcacttggctctacacacccccagaccttgcttcccaaggcagtgtttccccccaacccttcccgtgagacccaagagatgagctccacaggggttccgcatagcaggagccctctctggtttcaatcttttccctcccttttaatccaccctggctttcatgtgtgcttgctgagaaagttttagacgttagtgcatgttttgaaccagtcttggaacccagagaagtggaacgcctattccattacaatctgccttctctctcggactcacttagtagattagaatcattttggtactttctgtaaaaaaaaaacccctttctctccctcactcacctctgactggtgtctctgttctacataaatgaagtctctgttcactccctctttttggaaaattaaaactcagatgttccacaccccttggccactgggtgagacacatcctcctgtgtcaacagtgcccgtgcagaatgttggaggcgtccccttccggtattcttccacttacgtagctcagcacccgcccactacatgcgtgcacatacgtgtgcacccatgcatacactgtcaaacgttcctgagagcttttaccttaccttgccactctatttgaatagctcactacagtccccacaaaaagcttttccattcttctcatgcggttaccagacttattaaagccaaagcctggacctgccagccttaaccacctaggatcagccccctgtcgtccacagacagcaatgagagacaggggctggaggagatttattccatagaaccacacaagaagaagaaccaggaggaaaacaaagtagaagtctactgggcccaagttcaccttcagatcgctaatgtgaggtccaagtgttgttgttgttttgttttgttttttcaattaatttatttatttttattttaggtactttagtgttttgcctacatgtgtgcctgtgagaagttgtcatatcccctgcacctggagttacagacaattgtgagctgccatgtgggtgctgggaattgaaccctggtcctttggaatcacaagtcatgctcttaaccactgagccatctctccagcctagaggtccaggtttaaataaagggaaagaggtatacacagctaatcagtcctagtgaaggtgtgggcccgcctgcatatttagctcctgcctttgtgtctatcctgcaagcagtcagcagtatgtggtagctctttctaggagacatgccccacctctaactgacaccaaggtctcacccattccattcccttatgtggtactataagaaaatcccccacctttaatcccagcatttaggaggcagaggcaagaagatctctgaatttgaggtagcctggtctacagagtgagttccaccgcaatcagggctacacagagaaaccctgtctcaaaaaaaacaaaacaaagccaggcagtgatggcacatgactttaatcccagcacttgggaggcagaggcaggtggatttctaagtttgaggccagcctggtctacagagtgagttccaggacagccaaggctacacagagaaaccctgtctcgaaaaacaaaataaaaatttaaaaaattaaaaacaaatcaaaaagaaaacgaaagaaaattgcaattccttagagtacatttctcaattggctgatagccaaagagaggtgttataggcatggactggagtaggatcttatatgtcacaacaaagtctaggaacagataatagaaacagagactctttatgaagacacagaaagcacacctgagcctagaagcagggccagagagctggagacagataccagctctaagtagtgttcaactcccaccccaagagcggcaagcctttgtgggtcatccatgtagcacccagcgtctcccacacgtctgtatcctgtaccatcctgctcatgttctctcctttatatgcagccctgacagggagaggtttgtagtcttctgacagctggtttctttcatgtcagtcttgatgtctctctcctcaccccacgctcctgccacagagaggcacagtgtagctcttaagaatgtctttaccccttctaggatggctgcttatggcactgcccatgagactgtcccctgtggcagtgaatatggtaactactccacttgtgactttaattaaatgcaaagagccgtatgtagctggtggctcccaaactgaacagcacaggtctagagcaatagccaacccataagcaaatgagtagctatgctcttaaccactaagtagaacaatttagtgttagttattggaaagtgctttgaagaaagcaaagaaagtgaagaaacagtattggggagaagttcacttgcaaagaaatgatagtcaggaatgccctcagagggggtgggggtggattatctgacaagaggccctgtggtggaagtgtcgctcctgctcgaacagctggagcgtgtcagcaaagcagagggggcatgggtcaggatatgtccaaacttgcaggctgttacaaaagagtggagttcactgtggtgtgaaaccagagaagctgcgagaagcacccagaaccagctctggtcttaacacacgtatgtccctctgttgctccggagatgcagccgaggatttgtgggtggctgtgatataaatccaggctagagataatggcagcttctctcagagctgaacaggtgcctctgaagagtagagtggacaggactgctggtgagtcggctgtgtagatctgaggcccaagtgggcaatggcggagccctgacagacttgagtgctcatgaggggagcgcatgtttgaggggatgaaattcgaagaggagcagggggttggaagaagccgatgttagcacccaactacagacttcagctgcagcccctgcagccccaagaaggtaatcgtgcaacccaccccaatatgccaagagaaatggagaaaagcagaaagaatttttatccttttattttattattttatttggattttctaaacagggtttctctgtagtcatggttatcctggaactcactctgtagaccaggctggcctccaactcagagatccatctgcctctgcctcttgcgtgctaggattaagggcgtgcaccaccactgccgggtgagaaattttaatcagagtgttgggaagagcaaaattaaaggagtctagtgactacaggttcatcttctaagaattgatacgagctatgggtttaaaagagggagaactggggcaaaaggtgtgtagttaagaagacctggttcaaagtatgatcccgtgcatcactgtctgataagtgatataataacaaattcatctgtcaatcactgttatagtcaggatcccttcaggataagctacgccgcctctctatcagagatctcaccttagggtggcccaccctgtaggatttgccattactggaatccacagtgactgcagctttaagacaatgactctttgtgccttaaaccttaaaggaggctggcacaacttagatagggacacatgtcttaatgatgagcatgcctgggccaagtcaagtgagagtctgaatcaacgtaaaatagacagacacggaatgaaggcagaggcgtccagcgtccatccggcttagttacctttggagcctgagaaaggagtcagtatttctcagcaaaatcagcttcccagagtctgacgcaagtacagccatcagagggatgtggtcgctctctgccctgcttttcccatggtggctccttgctgccactccagagggacatgcacccactgttgacagagtgctccatccagaaaacaccagtgtcccagtgacagggagatcaggctcttgtgctcaccagggggcactggccctttcctgagtcctatgcagtttggcccctgagccctagtgtctcacaaagttgcccgttatataggttcttcacttctgtccttgagtcctgtcctaagtggaacacaaaagccagtaagtcatctattccgctcacttctcctagatgtgagatacccttgtctccaaacaccctcgtcctcattctaaatacacaatgacaataaaagtagtcacaaagtaaatgacattgagatgccaacagtggcctagcccagcagttccctagaactaatatttgtttgatgcagttccaatcaaaattcaaacaggattgtattttgctgttgattctgctttatgagaataatcaaaatatccaagaaagggttggggggaaggggcagggaggagcaaagaggaaccaccatgatgttaacatgcactccaaatatttaaaaaataaattaatagtaagccccagaagctagaccagatgtggactgggcacctaggaacaagctgtagtaaatgtaaaatgtagtatgtggtgaaggtgtttcgtacaccctacataacacaggctgctgagataacccacaattgctcaaggaaaagtggttgtacttaacttgagtgtgttatacttaactcaagataaattcagtactggtgactcaaatgtaaaacaaaaaccattcagttggcaggagttggtagcaggacacctataacgccagcatttagcaagctggggctggaagcctgctgggagtttgaggtaggcctgagctgtacatagcaagtagccatggcttaatagcaaggccctatcctacaaaacaaaagcaaacaaacaaacaaaattaagcaaaaggctctgaagaaaccgtagattccttattagcaattagtcaatatgatttaagtgaatggtcagcatgtaaaaagaggaagcatggattaacacatcatctaaaaacaaacaaacaagcaacaggatttccaaatattaaaccataatgaaagaagccacaaaaggaaaaaaatgattaatttgttatctaaaacttaagatttctatatgttagacttataaaaataccctcataacagctgaaaggcagacttaaattttgcagcaggggtgtaacttgtacaaattagtcataaagccactgagcaccatagtaagggagtgacattaaaaaacaaggccgttcacagagagagagaaagagagagagagagagagagagagagagagagagagagagagagagaataaatggccaggaagcctttgaaaacaatgcagcttttgcagcagtcaaacccatgggagtaggtgaggggggtggctcgtcggtgggtaaagcccttgctgcattcagatccccagagcccacataaggccacacatagtagtacctgtctatgatctcagtactcccacggtaatgtagaagacagagacaggagaatcctcagaaattctccgtgagctagcctgtcacacagaccagtgcgcagaaaaaagaccttgtctcaagcaagtagaagccaagggctaacttcctgagtttgtcctctgattactgtacacatgcaatagcagttacacacctacacacacacacacacacacaggtggggggttgttttgtgtttttaaagtataggggctagcaagatggctcagcaattaagagcacgaggggctatcctacaggagcagagtttggttctcagcacccacattaggtggctcacaactgcctgcagctccaggagatccgacggcctcttctgactcctgcagggatccacacacaagcacgcacataggagtaaaataaacctttttgttgttgttgttgttgttgttctaaatcacagattcgtcttgaaacaattttccgtatctcattgtcaaggccctttggtggtagtgcttcatggaagctgagctggggagtcagagcctctcaggcatggccagaggaaaaggccatctgaggcaaaaatgcagtcacgtgagtcaggagaactgtttccaggcctgtgtccaaaggcagtttatgacagcccaaactgagccaaccatgagagcacaggcccgagatcccagcactcaggagactacagcaagagaagccagacttcacggccatcctaggctgtgctggggagggcaaggccaccctggactcacaaacatacaaaacagtgtcacgtccctatagtgcaatactatgctgcccctttaagtgaaaatggggtacgatttgagagaaagaaggaaaggactgagcttggatttgtggtttatattatcctttacacaggccctacattttctatacttgtgtttttatgatatgaagcaacgtgtctgcatctattttcatttttactgggttttgtttgggtttttgtttgtttgtttgttttttgtttttttttttttgttttttttttgttttttgttttttttttttttttttgatggttgtgttttgggaccgaatctcactatttaactcaggctagccttgaaatgacacccacgatcttagtgcctcagccatctgagtatgtgcctcacaggcaggtgtctccacaccaggctctcttacagcgttgtaatgccatggaaacccatctgcaggccccagttaggtgtcttgcctctgatgttgcacagataaaaaagcaacttgcaacaccttgcttattctgcacagcccactctgcacttctgaagagcctaggctctttattctctcccgtaactttgtgtctctgagcatggagaccccaagcttgtttgcttgcctggttccactttcttcccagagaaaagaagagaacattgcctttcaagtttctaacccactgccagcctgccatgggggtttacatgtgtgcttgatttagtgccagttggggtgggtcatgggaacaaaaagctggtttcttttgcatagcgaagagtcgctgagtctggctctgttcttgtcccacagataggaagctgcctggttcgctcagagattgctacagttacaattgtctgtgctgaaatccttctgaaacactcacccggaagacgtcagcaaccaagggaagccaaaggcatttgagagggagtagagccaaaagctgagaatctcactgtcctgcacccacccacccactccagaaagaagctgttgctcagaggcagacggcatggcaagcaaacggaaatctacaactccctgcatggttcggacatcacaggtactggaacaagatatgctggaggaggcagacagggccaaagacaaaggagcgggcatgccacagtccgatgtgacaaaggacagctgggcagcggaacctgaacattcgtccaaagaaaccgaagtggttgaggtgaaatctatgggggagaacctgtccaaaaaactacagggcggttatgagtgcaaatactgcccttattccacgcaaaatctgaatgagttcacagaacacgtggacatgcaacatcctaacgtgattctcaaccccctctacgtatgtgccgaatgtaacttcacaaccaaaaagtacgactccttgtctgaccacaactccaagttccatccgggggagaccaacttcaagctgaaattaatcaagcgcaataatcagacggttctagaacagtccatcgaagccaccaaccacgtcgtgcccatcactgccagtggtcctggaagtagtgataacgaccctggggtctcggtaggaaaaacccccatgacaaagacaggaaagctgaaggcagatgccaagaaagtgcccaagaagcctgatgaggctgccccagaaaaccacatggaagggaccgcccgcctggtgacagacacagctgagatcctcgccagacttggtagcgtggagctccttcaagattcactgggacatgtcatgccttccgtacagctgccaccaaatatcaaccttgtccccaaggtccccgtcccgctgaatactaccaaatacaactctgccctggacacaaatgctaccatgatcaactccttcaacaagttcccttaccccacccaggctgagctctcctggctgacggcggcctccaaacacccagaggagcacatccgaatctggtttgccacccagcgtttaaagcacggtatcagctggtccccagaggaggtggaggaggcccggaagaagatgtttaacggcacgattcagtcagtacccccgactatcactgtgcttcctgctcagctgactcccacaaaagtgtcacagcccatcctccagacagccctaccatgccagatccttggccagcccagcctggtgctgactcaagtgacaagcgggtcaacaactgtctcctgctctcccatcacacttgcggtggctggggtgaccaatcatggccagaagagacctctggtgactcctcaagctgcccctgagccgaagcgtccacacattgcccaggtgccagaacctccacccaaggtggccaataccccgctcaccccagctagcgaccgcaagaagaccaagctacagatagctcacctcaaggcaagcttcttacagagccagttccctgacgatgctgaggtctaccggctcattgaggtgacaggccttgcgaggagtgagatcaagaagtggttcagtgaccaccgctaccggtgtcagaggggcatcgtccacatcaccagcgaatcccttgccaaagaccagatggccattactggcacccggcacggccgcacctaccatgtatacccagactttgccccgcagaagttcaaagagaaaagccaaggacagttgaaaaccctggaagacagctttctaaaaagctcctttcccacccaggcagaagtggaacggctgagggtggagaccaagctgagcaggagggaaatcgactcctggttctcagagaggcggaagcttcgagacagcatggagcaggctgtgttggattccatggggtctggcaaaaagggctcagacgcggtagcccccaatggtgctctatcccgacttgatcagctctctggtgcccagttagctggttctttgcccagtccttcatcagcaattgtacaaaatcaagaacaggttcacctgctcaggagcacttttgcaagaacccagtggcccactcctcaggagtacgatcagttagctgccaagaccggcctggtccgaactgagattgtgcgctggttcaaggagaacagatgcttactaaaaactggaacgttgagctggctggagcagtaccagcggcatcacatgtcagatgaccgtggtcgtgatgccgtatcaagaaaggtggcaaaacaagttgctgagagcccaaagaatggaagcgaggcggcacatcagtatgccaaggaccccaaagcactcagcgaggaggactccgagaagctggtcccgaggatgaaagtgggtggtgatccaaccaaggactgtttggcaggcaagccctcagaggccacctcagacagatcagagggcagccgagatggccagggcagtgaggagaacgaggagtcaggcatcgtggactttgtggaggtgacagttggtgaggaggacgccatctcagagaagtggggtagctggagccggagagtagcagaaggcacagtggagagggcagactccgactccgacagcacccctgcagaggccggccaagcctagacaggtaattctgcctgtttactccagggaatgggcgaatgcaggtttccttttttttattggcagcgttaacataagacaatgagttccaagatgttgacaaagacagtattcttttttaaaattaatgtattgattgtcaatatatattgacacacacacacacacacacacgcgcgcgcgcgnnnnnnnnnnnnnnnnnnnnnnnnnnnnnnnnnnnnnnnnnnnnnnnnnnnnnnnnnnnnnnnnnnnnnnnnnnnnnnnnnnnnnnnnnnnnnnnnnnnnnnnnnnnnnnnnnnnnnnnnnnnnnnnnnnnnnnnnnnnnnnnnnnnnnnnnnnnnnnnnnnnnnnnnnnnnnnnnnnnnnnnnnnnnnnnnnnnnnnnnnnnnnnnnnnnnnnnnnnnnnnnnnnnnnnnnnnnnnnnnnnnnnnnnnnnnnnnnnnnnnnnnnnnnnnnnnnnnnnnnnnnnnnnnnnnnnnnnnnnnnnnnnnnnnnnnnnnnnnnnnnnnnnnnnnnnnnnnnnnnnnnnnnnnnnnnnnnnnnnnnnnnnnnnnnnnnnnnnnnnnnnnnnnnnnnnnnnnnnnnnnnnnnnnnnnnnnnnnnnnnnnnnnnnnnnnnnnnnnnnnnnnnnnnnnnnnnnnnnnnnnnnnnnnnnnnnnnnnnnnnnnnnnnnnnnnnnnnnnnnnnnnnnnnnnnnnnnnnnnnnnnnnnnnnnnnnnnnnnnnnnnnnnnnnnnnnnnnnnnnnntcaagtttaccgaattggagactcaaagttgttgttttgcacctgaaaggctttgacaatggctccttccttgcttctgcctctcaggaaaaggtgcctctctgcttgcctcgcagtaactccctcaaatccgggacaagacctgtgtagatttagacctgaggagccacaaaagccagggaagggaggttaccatggttactaatggccatgtcatccacataatgggacgggccttgaagcccttggtgcgtttgcttcccaagaggtcagtgcaagtcaaaccccagcgtagcagcttggctgcgggagagaaaaggaggtgggaggaggggctgcttggctgagagatcacaagagcagcctgaaacgcaagcctgaaacgcctgccatgatctgaccaggtgagctgctccagaagtcacttcagccatggaaggagcctcccaagctaccctctcacataagggctagagtctccaggatggtgggtatggtcctgaaggaacccctagaaatcacacacctcatggttgatgaacttaaacaacgtgggccagccgtgttgctccttagtaactccattattgtatgctaaaaacaaggtgtccagcaaatcactgaaaccctctggaagcttctcccagccagtcccggcaatagtttaatgcattgtcaaccccggaatatcatcacatctccttgcggaactgcccgtggatctgagcaaggatatagcccaaagaggaggtgctggtgataggtgggagtcctgagatcaacaggagtatcaacaagccacttctgtctggcttccttggtgtcttccctctctctagccatttccccaccttcttagaacggcctgccagtctagctgtcttccctgtagaagcagagtcattctgttttgtcttgtcttgtcttggtttgtgtctgcatgaatgctggagctggccctgagcttctcttcttgatcttgatccatgacaagaatttacaacgttgctatttcttcccaccttagagcggacagtaggttccattccgttcaacagtatattctgagcatcctgtggctgccatggtagataccaaaagacaatggagggagacagacagtgcagttcccgtccccaacatagctcctgtggactgagggcagagacagaacttcccatcactagccagtgtggcatgtgataggatggggacatgcactgtggtgtgggtactcattggaggcatacccagactggatatcataaggggttaaggggacagaggagactgactttggggtagcttttaggagagtcaagaaattagacaaagaaaagagttgctcaagcataaagagcagcatgggccaaggtccagagatggcaaagggacattacatgtgaggaccagaagaggattgtcattgccaggaagtacagcagctctgttaatgattaaaagaagcaaactgaaggcgaagctaactgtcttctctaggatgctgaagctactctgaaccagctgtgttggctgaattgaacatgaggatgcaagtaccccagcacaggctcttccccacagctgggtaagagggagcctaggggcagcagggtaagagagacggggccacctgttggcatcccttcccccaaagggatacaccatctgggtaggctaggatggcctcattccctgaggcctgaaggaaacagagctgcaaggatcacaggaagacaccttagggaaggagaagggaagacaggtgaaggtctccggaggagcagcagcctagcctgggatgccatgttctcacctagttctctggcagaggtaactctatatagtcttataatccaaaaagtgagcctcagacagcaagaaacccacatccctccatccattctccagctggattctagattcccactcttcccgatgcctgtcagttctctgcattctgacaggcagaaatgtcccattgctgttggtcacagcctttcctctctccatttaataaccctccactgtctactccagggtgaggagaatgcccaggggtttggaagttgagtgttgaattaacatcagaccattcagagatgtaggaaactacctgtatccccattttctgtttatgaggaagaatctcagtcgtgagctgcagatattcctaaactagatactggagctgttcagcatctgctggtatcacatattcatgatggcctcttgacagttcagggaactgtgctatagaggaagggcctacaggccacacaggcagagcatctgaaaaccggcccaagacctaaccagaagcacccctaagagacatcctctaacttacagggtggaaaaaaagtcttcctaaattatggatctcttaaaatccatgggtactacctaacttgtgtattgggaccgaggagatggttccgttgattaaactgatggctgagagtccctgtacaagtgtgagcacagcagtggtacacaggggtaatcccaacactagggaggcagagtcgggaggatctcagagctcactggccaaccagtttagccaaaccctacaagctccagtttcatgagaggtcctatttcaaaaccttagatgcagaatgattaaagaagaaacccagcatcaacctctgacttatacacacgcacatgcacacacacacacaagatatatctaggaaattgcagttatctgcaatggaaacatatatcgtaatcccaaaaataattgatggttttaaccttatgaaggtgttacatgaaacccaagatggcagaatggtagcaagccttgagagaagcaactccatggggctcgaggattggattttcccctacgggactcagtagttcccctaatcagcccctgagtatgaatatctgcaagctccatgtccgtggctcacctcagccttaaggttaggcgcaaccatcagtcatccttcccagtccttggataacgttgtattggttcaggcttaggatttgcataatttcttatttatctcattgatagatattgcttagagagaggttaggaaaatatacttttttccctctaaaactgagtcaacctacttaggcaagacattctcaagcttatgtctgaatgtgtgatcagatgaactatcttattgctgctgctgctgctgctgcgactggtgatggtggtgatgatggtggtgatatggtaattatggtatgataatgatgatgatgatgttaatggtgatgatgatgatggtggtggtggtgatgctagtgatgataagcttccattcattggcatatacaatatgcttaggtttctctgaaacatacctcacaagtcctttgaacctccccaccatctagggagtcaggcacagcttttcctccagctcatagagcacaaaagctgttatcaattaacacttggaaccacctttcatctgtcaggccagtgtctaatcactggggccagcacttgcttcagtgatagcaacattcccttgctcaggccaacaaacagaatgcagtcataatttgcttgggagtggaagctaacattctgtattaattacattcttgttactgttaagaatatagggctggtgagatggctcagtgggtaagagcacccgactgctcttccaaaggtttggagttcaaatcccagcaaccacatggtggctgacaaccatccgtaaaaaagatctgactccctcttctggagtgtctgaagacagctacagtgtacttacatataataaacaaatgaatctttaaaaaaaaaaagtatatgacagagacaacttaggaaacggaaattcatcattggttcataggaaaagcacggggacagtgaggtcacctccatcctcagcaatggcttcactacagtgtggcccaggaagcagattaaacacctcaaaaccacagaagatgtagtcttcagaggcctggccccagtggcttactaacaccagtcattccccacctctcaaacactcaagagcctctgaaagagccctaagatggggaaggagccccaaagcataagccatagcacactgctcagcaggagcttctgaaagagagccctaagatggggaaggaaccctaagatggggaaggagcctcaaaacacaagccatagcacactgctcagcaggagcctcagagaacctactttgggccagacactatgaaagttcatggctttgccaaaacaaaaaaccaacacacggccctacctggatctcagcctaagggggtaagacatccataaagcagaaatccatctggatggctcttttttaaagactttttaaatttttattttcaattatatgaacagagagggtgagggttatgcacccagggcaaaggagggcggaagagggtgttagaaccattggagctgaagttacaggcaattatgagctgcccatcttggattctgggaaccaaacttgggtcttctgcaagaacattatgtattcttaatcactcagccctgtctccaacccccaccatctggactgtcttatgagaactatgcacacagaaattggaggagccctgagggaaaaaggtggcttttctggtaaaaactcatatgcgcaagctttcttcgcgttcaaacaaaggaaactcagaaacctgaaagaaggcaccaggattcactcagccagtgtctaaatttggctctagatctccagccactatcttcatggtctccagatttctaacagtttccaactcttgatgatttagcaatagctcagggagggtgtgaaatgttaataaaaatagcaataataataattgccatggtttagcttccttaaaatacttaaggctgcttaattgttacatgttggatacaacttagggtccagaatatttatacacacatatatataaatatacatatatatccatccctcacacactgtacagattagttgtcgatatatagatgagtgaacaaatgaatataaatgagtgaatgaatgagaatgaatgaatgaatgtatgctaatcattagttttcctcctctcttccccactagactcttgaagtcaagggccccacctcacctcttcagtccctggttccctgtgcacaggcagaagagacactcagtcatgggtgtctctgtccatcagctagtaaggcaggctggacggtttcgaatgaaaggaggctgatttgggctacactcctggaagtgcatagttgagtgaccatctggtgttggccttcttgctggtagaatcccaaaacagttcagagacaggaagcatggaatatgtgggtgggtgggagaaaaggagggagggagagattatggagagagagagagagagaaagagagagactgtgtgtgtatgtgagagagagagagagagagagagagagagagagagagagaaggagggatcatggagagagaaagagggaggcatcatggagcatatctgtgtgtatgtgtatgtatatgtgtgtgagagagagaaggagggatcatggagcatgtgtgtgtgtctgtgtgtgtctctgtgtatgagagagagaacaaaggatcatggaatggggggcgtgagtgcatgcatgtgtgtgtgtttcctgatatctctctatcttgtgttttaattataattactaaaaccatgttatttgtgcagacttggggtttctttatgacatccttgggcatgctttagttatgtcccccccttcactcccacacctccttcttactccctccgagtcactctggtgctcccaaggctagtgctggcttgttttgctcccttgcttttgttgtttgtctttctgtgtctgggttacttctcttaacacagcgagttccagatccatctgtgacaagatttcgttttcctttctaatgaaatgctccattgtgttgcatgcacaatatcgggttctgactgcctgactgtcttttgataggcactgtagacttactgcatatagacacatggctcttgtggaccaggcttcagtcaacatggctgtgtagatatctctagtttgtgttcccttgagtcctttggctatagagctagatcagagagctagagctctgtttttaggtttttgttttgtttgatgttgtggtggagggtggctggattttgttgttgttgcttgtttgtttataaggaacttccatactttacacaccacactgctgcctattgtaacagttacctttcttgttgcaaccaaatacctgatgagaagtgatttaaggaaagaaagggctctttcctacttagaattccagggatacatcttatcatggtgggagactcacagtggcaggagcaggggccagctggccaccttgcatgagcagtcaggaagccaagagaaagaggatgggaccctgaaataaaacagctcacttcctccagcaaagctctacctagcaaagcttccgcaccttccaaaacatcattactagctgggaaccaagtgttcaagcacatgaacccgcagaggacacttgtcactcaagccaaacacacaagccaaatacacaaaacactatggccaaagtgtaacttctcaatacctgtcttagggtttttctgcggtgaacagacaccatgaccaaagcaacacttacaaggacaacatttaattggggctagcttacaggttcagaggttcagtccattttcatcaagacggaaacatggcagagtctaggcagacatggtgcagtaagagctgagaactctacatcttcgtccgaagactgctaggagaaaactggcttccaggcagctaggagatgggtctgagagcccactccctcagtgacaaacctactccaacaaggccacacctactccaaggccacaccttcaaatagtgccactccctgggcaccacagtgcccaaagaaaccagcactttcacgtggtttgctttattggtatatttactcggttaaagtagtcttaaaactgaatccatagacttgtccaaagttccctgtaagatcggatgctcatgaaactcctgtagctccccagaaaaggggactgtgctcagcatcatctgtgtccctgctgaggaagtctgagtctctgggtgggtgaagggaagagagtgacggtggacaacaccaaagcatgaattnnnnnnnnnnnnnnnnnnnnnnnnnnnnnnnnnnnnnnnnnnnnnnnnnnnnnnnnnnnnnnnnnnnnnnnnnnnnnnnnnnnnnnnnnnnnnnnnnnnnnnnnnnnnnnnnnnnnnnnnnnnnnnnnnnnnnnnnnnnnnnnnnnnnnnnnnnnnnnnnnnnnnnnnnnnnnnnnnnnnnnnnnnnnnnnnnnnnnnnnnnnnnnnnnnnnnnnnnnnnnnnnnnnnnnnnnnnnnnnnnnnnnnnnnnnnnnnnnnnnnnnnnnnnnnnncaaatacagggctatgatatgcacatacgggccagtctgtaacacctaaagagctttctgctgctgctgctgttgttgttgttggaattaaatgagataatacatgagcgcccctaggtgccggcattaagagcggcggcacctgttcagtagagacacctgtgaactttttttttttttttttttttttttgcctttgcatatggtgagcttggctcgttatttcctgcctttccagactggcattttctgtcgtggacccgtctcatgcaagctcatgccatccactcactgtatatcaagacgggtgtgcttgagaggcctgtgacagcaacatgggctggcattcgctgaggactgaccatgccaggcacaactcaagcaccttacacccgatcattcatccttctcagtaactctgcagtcagcgtgagtttcttcgtgtatggcccatagaaagaagcaaagaaagatgacttacccacagtcaatccagatagaaagtagtttaggattcaaacccaaacctagatgtataacccgattggcctatgggcatgttttagtcgttacttcatgtcggaggtcccagctatataagaaagctaagtgactataagccagtctagggaccagccaacagcctcctctatagtccctgcttgtactactcccttggctgtgaacacagtgagtttctagacagaggcaatgtggtgtggactaacagacaggcctgctttcaagttcctgccttgacttcccttaatgatggactgtgtgtgctctagaatagtaagctcaaacaaacccttcctcccgtaagttgcttttggttaaggggggtttataacagcaacagaaatgaaactgaaatgccactttcagagtcccccctgatagaactaagatttgattccactgtagttagattctcttataccccagtgggttctgccagccagtggaagggagaagaaggagccacatggcccatagatgccaaccgcacttgagccccctgatcagcctggggtgggatttacccaacctttgggtctcagcaagttctcctactcagaagccccctgcccccaagctatcctataaatgagagctttagccagatgaggcaaactggacccagatctgctctggggtcagcttggaatgacagttttctaagtcgccttggaagttgcttaatcccctttcatgtcaacttaagttctcttcctgagttctaattaaagtcagaccattgccctctgcccccaaggagacaaatgactcggaaatgttatggagagctttagacatagacaagagaatggtgttgggggagcttgagggtcacactgtgggtagaatggtgcagtatcttctagagatctgctgtcctgtggaagtgcctagagtgccatagtgaacaaccaggtattatatactacaaatatgttaatagggcagatttcatattaagtgtccttaccaccaggaaaaaaataaccagggaggaaacattttggcaggggacaaatatgcttacactgacactattgtgaatatgtgtacatccaaattcaccagactgtatacattgtcatgcgaggttttgaataccagtaaagtgggggggaggattactgtcagaatgtaaagttagaatctagcctctactgggtgggttacaatgcctgcagcagccttctctctcactttcacagatagcaacaggcatcctgctgagacatggtctctgggcccctaaataatagacaacccagtgcccagggtgagggttgtgggggggggagtcagagtacatcaaagcaacacaccctgctctctccacccttccatgcctctgcttgggaatctgggaatgagagagcatggctgcaggctcttgcaatgaaacccatccctaccctcaaagctctaagaagagactccctcctctgccacaccggctctgattgtcttccgagccctggccatgctgtctgtctctgtcacgggggcctaagctatcctcagagtctcccccatgttgttgcctttctgtctctctagccatggctattaaaaaactcttctagtacaccctttattcccccaggaatctagctctgtatcctcttgaacccacccctatccaaaaccttatggtgaccgacagaggaaccacagtttttttttgttttgttttgttttaataaaaagcaacatttaattggggctggcttacaggttcagaaggaaccacagttaaactgaaagcagttttcttcccaacagcaacagaggacccatgattattgggtgaaatggttagcatagagccagccctcggtgagtaagcagtacacttgcttagcctatctacacacacatacacacacacaaattccagatgaaagaccaaagccagactcccaggctccatgccactggaatcaggatttatggcacatcagtgtgacgggcattttaacatgccccactgcaaatctggacacatttggtactttttgaaccctgggcaagttggattcaaggctccctttctgctccctcattggtgaaacagcgtcccagcctacgtaactgcacggccctaagaagcctaacctttagagtctaagagatataactgtcagcttcagatacgggcacagtggctgtacatcccctctgaccccacaaggaaagcatcttcccttaacaaatgtgttgagagacggctgcggctggcttggatgacgacctcccaaaatatccacatagaacacagcattgtcccgagggggctggtgatggtttgtttatgcttggcccagggagtggcactattaggaggtgtggccttgttggagtaggtttgtcattgtgagtgtgggctttaagatcctcatcctagctgccctgaagccagtactctgctagcagccttcagatgaagatgtagaactctcagcttctcctgcaccatgcctgcctggatgcagccatgctcccatcttgatgatgatgaactgaacctctgaacctgtaagccagccccaattaaatgttgtccttataagagtggccttagtcatggtgtctgttcacagcagtaaacccttaagaacaagctagactgagtatggtgaggccattgagaggaaacggtaccagacctaggaaagcgttcatccttgcttccaacggctctccagctcctccctggaatgtgatggacaagatgagccatgaatggacatctgcacgccagcagccacagaggacaagggacttatcttcagcctcatagtgtcaccagcagccagttatcactgaagtagaggaatagggtagtttgggagacagatagacaaatagatagacagacagacagaatataagaatatgttatgggaagatattcaccatctctctcagataatggagttattctctcccaagttctcaggggctggaaagaaagtcctatggtggaaaaaagaaaaaaaaaaagctgattctgggggtttttgttattgttgttgttttgatttttgtttgttttttcatgttttgccaacatgtagaatactagggaaacagattttgccaaagaattagtattttcaacatgataaattatcctcaggacagatgtaggaggcttcctgtccctgggttatactgaggttggatttccttgtggtaaagcctttctaatggaggccataagaaagtgtgcctagtggccttgcagtttcctccaaagctctggggtgaggtgacccacggggcatgcctgctctgctgggtggtatccaaccaagcgataagactccctagggaagtagtgagggctacccagacacagcacagtgataggttataaagaaaacaaccaaggctccagggtggactttgtcactcgctggacagcagttacggctggaacagctcctcgctcgctctgcgtttccactcactaacaaatgccggttgagtatcccatgtgtgcactccagggagatagtggctagggccagcaccaaacactacgggtaccacaaatggcctgaccacctcacacccacatacaatcaaccagacaactgaaggcagtatgtgatggccactctggaaggtatcttggatgtgtgacttggggacaactctgtgtgtgatgaggtcagggactggaagaacagcgagctggtgaaatggaaaagaacaggcaaaatattccccgcccatgtctgatctcattcctgaggggcctgaggcttcatagaggctgggccttgttcccagagcagcatgtcaaggtggtacagagaggaagcagagtgacccaagaatgcccctcaataacacggaagcaggaccatacccagtgtgccagggcctctctctgatcaggagcccgatactggcatacactgacggaagaatgactgctgcagatggcgaaggggaccatgggatcagaactagctctgtcaaccatgcttccttcaatgtgcacacaataggactgtgaggagcacagactcgttcactctcactttacacgtagcaggaccgtgcactgtaaaggaaacaagactagcctatggagcacttgttggcctttaagtttggaccatgagcatctgatgcccgtaaacagggctcccatttccagcctcactttgacagctctgccagttcccacatcctgagccctcccacggccacctactctgggaacatcagaggagaattagagtccaagagagctgaaaaatgctttcagggtctggagccatgcacatgtagttgggataactgaagagagagaaaaagaggcggggaggtggggcagtggagcgtgccaggaaaccttggtgtcttagtcagtgtttctattcctgcacaaacatcatgaccaagaagcaagttggggaggaaagggtttattcggcttacacttccatactgctgttcatcaccaaggaagtcaggactggaactcaagcaggtcagaaagcaggagccgatgcagaggccatggagggatgttctttactggcttgcctcccctggcttgctcagcctgctctcttatataacccaagactaccagcccagagatggtcccacccacaaggggcctttcccccttgatcactaattgagaaaatgccttacagttggatctcatggaggcatttcctcaactgaagctcctttctctgtgataaccccagctgtgtcaagttgacacaaaactagccagtacacttggtaaggtcgagctggttggaagtcctggaacctcataccagagaatggtaggagcttcacctgcttcggaccagtcccctgccacgtgaccacactccctacatgggaatgtgacctatggtcacctagatcatcagaacagagttctccatgctaatgaggtacctagaggccctgagggtttggccaataagcttccctttctgaacattcctttctggaaaaggtatttaatctctggcccaccctgaggaagtgctatacagccatttctcacgatgagcagtcactaaacaatatggataagaatggactgtctctttcatcaagaaccaccgtaggcccctccatgttcccagacaatcacctctaagctaaggacaattgctgatgagctaagatggactttcccatcccatggccctgggctcattcatcgccctctgcctgtaggcctcaactccccaagacccagcagcatctggatgtccaggaccttgcgagcccccacccaggcatcgtaggctgcgtcccctgagcagtgcatctgtgcttcccgcgagcctagcacccaacagcaggggcatagggtaaatgcagcctagcacccctctgcacaactgacggctgatgtcctacaccccagcagaggggcggagcttggaaccatgggaggagctttgtctccctttatctgggtcagacttttggcctgtcaatcagtcccaaggactcattttatcctcattgctcaacattttatcatcgttatcatcattatcattacacccatctttaaaatctatctaaggaaggccgctaagatggctcagctggtgaaggtgattgccaagcctgagtttgatccctggagcagacacaggaaaaaagagaagtgactcccgcaagttgtcctgtgacctctacatcacacacacacacacacacacacaagcgcgcaccttgtcagcttatgccctgtgcctctaaagttactcctaaatcagaaaaaacaaggcagtatctcttgagaccctgtaggtcaggcttttcttgaatatagcagaacacctgacaagagtgacttaattggaattttagcttacagttcagagcggtcaggccatagtgatttggagctgtgtttctgggtctggatcgtggcaaaagatgccggcagtgggaaggaacgtgtgattgacagaaggcagaaagaacgggaagcagccagggatagcatataccccaaaaccctccccaggtgtcctgcttcttccccttgggccttacctcccaatgtattcatagctgcccaaaataacccagcagcttgggatcatgtgtttaaacacagataggccacagggggcatttgaggttcaaacctagccccagcttgaagggcttctgtccctccttcaaaccccatgaaaggctttggaaggtgttcccaccctgcaggaggcctgcgaagaagccttccacccctagaagatggcagtcctctttctgacatctctttgctttgtgtcatccctctagggcatcgggtctgaacctccgcactgacgagggaggtgctctgtctttgaagagagaagaaagccccgccccagtggctgtgggccacctcaccagcgactctgagcaggcgtgcttcagtggtgcctggaggccacaggaactccggagctctcaatgtccctcccagaggctgggtgggagttgttcatagtgccaaagtcctactactgcgttttcaatgggtccctgtgcgtagcctttgccttcgccccagccccgcctcttgctatactggaactgatttatacaatgtgggaattttgttacctttttaatcgagggcaacttcctttttccagcacttctgtggtaaggcgtttgcattttgttttgttttgttttgtttcacccccaggaaggagggctaaccacattgcttttcttttctctttcttcctttcactttagtaacgagggggagggagcattagcataagtaccactgtatctactggattttaggtaggacggatttcttctttaaggtagtttgacatgggagatgccttggtgggaagggctgacgtctggcgcaaagtgggatgagctcacaaagagccttccccatcaaacccttcccagttccccagctgccttttggggaccctgcctcagctggcttctcaactgccttggataattggggaacaggtggttgccctctttacaaatcgttttgaaataccagcagaaagggctcccacaacacttgatgtcaccatcactcttgggaaattaagagagtggtcttcccggcctaggtgtagtaccgaggtaaacatccctgcttttcttttctcttctcaccaccttttcttggtgtggcttttggcaagatttcagctcaaagcctcactaatggattgatttgttgttgttgttgttcctgtgtctgtgtgtgtgtgcgcgcgtgcgtgcgtgtgttgggccaattttagatacctgagtgcactttttttttttttttagttagtcctagcttttaaagaaagaaagccaagagatctagttggtgtaaatgtggagacagggattctgttcgctgtccttgtcccctcccccaccccgcagacccccgaccccactggagtacactgcacaaattaaatgctagggagtttgaataaaagcagtttttctaacttgttgctcatctgttgtaactcaataaagcaaagactaaacgtttttctaaccttccctctgctccctgttctttattgtcgcctggctcctaaggcctcagcctgtagtcctgacgtggccgcctctcactgccaattcattatggccatatatttttaaggttttttttttaagtgtatgagtgtgtatgcacacgcacatgcgcaaactcacagacatgcataaactggttttttattattattatcccttttgttcatattcccgtgaccaaaattcaaagtcatggtaacacctggctataagaaaagctggccaagtagccaagagtgagaaggagaagccctatcctaagaagaaaggggagtggataccatggtcagacaatcaaccacaaggagattcagacctcaggtccatctcccttcctagttagatgagctaccaccagctactttgcattgcatctggtttagtctgagaatcatgaccaatgtcatcctgaacttagaacagagtccaagactctccaatgtcaaagtcgactcttacccatgatgtcgaatgtctctagtgtctagatcagtctctgtcacatacacccttgtggttgctatctttactgaggcttctcgccacaagacagccatgcctgtggcttggtaaatggagtggagataaataattctggagttgacctcagggaacagtgcctgcttcgttgcacaggggcaaccacttacatagtggaagcctatgtactttgattggttagcaaagaaccttagattggacaatgagcgtgcacaccaccagagcctctaagtggaggaatcacataaaaacacgtagagcgcagactcatccaaaggcaattactggctagtcaccctacttcagaatccagtgttctgactttaggacctcggtgtgccatacttatttagaagcacggtgtgccatgtagcctggctgcctgcagatcacgcctgcagaatgtctcctacatgtggtgccaagtcacgagcggtgaggccaacggcttaggggtctggttagagagaaggctcttgagaaaggaaaccaaaaggtgcattaagagtcagacctaagcagggttcctgagtgtccgcccagccagagaagaggacaggcagcctaaaacggaggctataggctcatgtccagacacaaggaagggaataggtgagcttccaccttctaccacaccttctaccacgagtgaagctagcctctgcacatcttgcttcctcctgagttccaggagtgtaaagaaatgaaggtgaggtggttannnnnnnnnnnnnnnnnnnnnnnnnnnnnnnnnnnnnnnnnnnnnnnnnnnnnnnnnnnnnnnnnnnnnnnnnnnnnnnnnnnnnnnnnnnnnnnnnnnnnnnnnnnnnnnnnnnnnnnnnnnnnnnnnnnnnnnnnnnnnnnnnnnnnnnnnnnnnnnnnnnnnnnnnnnnnnnnnnnnnnnnnnnnnnnnnnnnnnnnnnnnnnnnnnnnnnnnnnnnnnnnnnnnnnnnnnnnnnnnnnnnnnnnnnnnnnnnnnnnnnnnnnnngggagggagggagagggagaggctggcatagctggctagttctggtccctgcactgccttttctctgtgtcaccagcacctggcccctcttcactcccatgctgtcttgtccttcccattaatgaatgtctccagcacatctccacaggtggctgcacttccctcctgctatttaccacccttgcagttaggcttgcctctcagaagccatttaaaggaatccttcaagcaagtccgtgggagccaccatcaaatgcctaatgtctgtagcaacctgggggaaaagagccctgataataagtcagggatgaaaagcacggggaagatggctctgtccttttaaccaccaacaaaatgtatcaagctgagcttctccagaatggcgggcccgggagagagactgtgtgggacaggcaagggtcctgaggaggtgggaaagagcagcaggcagagcctgccagcagctgcttctatctattgtggctcctttgcactcctagcacttctttccagggattttctcttctgtgctaggtcttctgttgagggtgggggcagtccgtcatggggattcacttcccccaccgggaaacagccgtcacactctagtgtgcctacacagatacaaggccacacacaaaacccaggctggaccagtcaggttctaggagaaagtctgcttcttccagggtagatggtgagtgtggtagtatttgccaggagctttgccagcttctgtgactttttataggacacatgaataaattatctacgcaccctgagctagggcaccaacaacaggaccaaataaatggtccctccaattttagcgtgatgagccagtaagttttacagagacttcttacaagagtgccggtaactcgggcatatatatcacctagcatctatcacctatcacctagcctgggtgatgactcacaagagctgagtcattgcagctctctgtgcaacttgctgagggcctctgcttaatggtattcaacctcaagaggagccttacctcctgagccttgtaagtttcctgagactcataagcatttttcctcactctttcccttgtcctccccctcctccctccctctttgctctaggagagaacatatcaagccagaggagacagccatacaacaagcctcccaaagttagaggtcttgccaggataggaagccaatgtataaatgaaaagtctatgtggcacaaaaagtcaagaagggagtggcatccagaagggatgcaggtgatgctaaatggtggcagtgacatcatttgagtccctaaagtccaaagttcttaacaacatccatctccctgttcttccatttacattaatgtaacatatttccccatttggcatgagctaaacaaagttgtgggttgggtttcggttgctaaaccaggtgacaagagaaaaagcaaggaggataaaatgcatgtaaagagacatacggggctagtgggtggctacagagctgggtggtgcagcgctacattgtccacattcaaatgtgctccccagatctccagcagcagcaactgcacagggtgcccaggtcatcggcatggtcattaaaggtgaagaggccacactgaagacattggatagctcctccccacgtatgggtgagtggtaaacccaatcacgtaccaccctgtcgtcagcatgtagaccagtggccaggagagagaagcagaagggagcaaaggagatcgggtgtggtccagcaggcatgtgcacacttctctatctagcacacttgcgctgccacagccccctggtaatgacagctctcagtggcctgacaatacaatctggagccaggagtgttagatccccatgtaaaacacctcacagtgcctcccccttatgaaccgtggctctagtaatgtgggaggggtcagtacacatgactaagcacttgagcactttccagaaggccttagaatcagatatcccacagcgtggaagaggactctggttcctctcaactttgaaggaattaaactcttatggggagaataaggtttccctccatcattctaaaaccttctccatagcaagcacctcaaggattagactttgtttggatccttgcaggtgaggtagagcttacactgcgtaacctgggggcacttattcaagctacaattacaatggtgtaggtagggtttgggaaaacagctaaggatggaggaaacgagcttgtctagaaaaagcaaaggaccagtagtggacagaagtacagagtaggctacctgaaaggagatacaatgtaagccacattggctacctgaaaggagatacaatgtaagccacggtggctacctgaaaggagatacaatgtaagccacggtggctacctgaaaggagatacaatgtaagccagggtggctacctgaaaggaggaacaatgtaagccatggtggctacctgaaaggagatacaatgtaagccacggtggctacctgaaaggagatacaatgtaagccacggtgacccagcagggataaaggcaagggaataaccattctcagatcaccctctgttctgctgctgcctcaaaacagccactgccaagtccaagtcccagcacaaaagcctctgttgatcagatccttccgatgctccaggaaacaggtcagtccatggaatggactcaaggtggcaaatacacaccaaccttgccattctgccacattccacctttaacaacgaacaatgattcatcaacttgacctttacctgtcagcttcataataattaaggtagtgctccatcatggttctgacttcacagtgtgagatgaaacacatgtgggcgccactggttgcctggctaacagctaattcctctttctttgttattttgttttgaatttgtgtgtgtgtgtgtgtgtctgtgtgtgtgtgtgtgtgtgtgtgtgtgtgtgtgtctgtgtgtgtgtgtgtgtg

SEQ ID NO: 375 - DNA, 4094 bp, Mus musculus
cccactgatcgaggcattttccccctttttttcttttttcttttcttttttttttctttttcttttctttttttttttcttttaaaaaattcgatcaaccgttctccgtaccggggcttttttctgtctatctgtctgtctgtctgtctgccaggctggctttcccccaccaccacctctttcccacggagcccgagtcgggcgccgggtggggagtggggagtgggtggggggagccagcagagttccattttggaacgcccgtgcctcgtctccgcgttcccagcccgggtccccgcgttcgcagccccggcgcaggtctccatgcactggctgctctgggaatctggctgcaagatccccaggatgtaaggaactcacagcagacactgataggaagctgcctggttcgctcagagattgctacagttacaattgtctgtgctgaaatccttctgaaacactcacccggaagacgtcagcaaccaagggaagccaaaggcatttgagagggagtagagccaaaagctgagaatctcactgtcctgcacccacccacccactccagaaagaagctgttgctcagaggcagacggcatggcaagcaaacggaaatctacaactccctgcatggttcggacatcacaggtactggaacaagatatgctggaggaggcagacagggccaaagacaaaggagcgggcatgccacagtccgatgtgacaaaggacagctgggcagcggaacctgaacattcgtccaaagaaaccgaagtggttgaggtgaaatctatgggggagaacctgtccaaaaaactacagggcggttatgagtgcaaatactgcccttattccacgcaaaatctgaatgagttcacagaacacgtggacatgcaacatcctaacgtgattctcaaccccctctacgtatgtgccgaatgtaacttcacaaccaaaaagtacgactccttgtctgaccacaactccaagttccatccgggggagaccaacttcaagctgaaattaatcaagcgcaataatcagacggttctagaacagtccatcgaagccaccaaccacgtcgtgcccatcactgccagtggtcctggaagtagtgataacgaccctggggtctcggtaggaaaaacccccatgacaaagacaggaaagctgaaggcagatgccaagaaagtgcccaagaagcctgatgaggctgccccagaaaaccacatggaagggaccgcccgcctggtgacagacacagctgagatcctcgccagacttggtagcgtggagctccttcaagattcactgggacatgtcatgccttccgtacagctgccaccaaatatcaaccttgtccccaaggtccccgtcccgctgaatactaccaaatacaactctgccctggacacaaatgctaccatgatcaactccttcaacaagttcccttaccccacccaggctgagctctcctggctgacggcggcctccaaacacccagaggagcacatccgaatctggtttgccacccagcgtttaaagcacggtatcagctggtccccagaggaggtggaggaggcccggaagaagatgtttaacggcacgattcagtcagtacccccgactatcactgtgcttcctgctcagctgactcccacaaaagtgtcacagcccatcctccagacagccctaccatgccagatccttggccagcccagcctggtgctgactcaagtgacaagcgggtcaacaactgtctcctgctctcccatcacacttgcggtggctggggtgaccaatcatggccagaagagacctctggtgactcctcaagctgcccctgagccgaagcgtccacacattgcccaggtgccagaacctccacccaaggtggccaataccccgctcaccccagctagcgaccgcaagaagaccaagctacagatagctcacctcaaggcaagcttcttacagagccagttccctgacgatgctgaggtctaccggctcattgaggtgacaggccttgcgaggagtgagatcaagaagtggttcagtgaccaccgctaccggtgtcagaggggcatcgtccacatcaccagcgaatcccttgccaaagaccagatggccattactggcacccggcacggccgcacctaccatgtatacccagactttgccccgcagaagttcaaagagaaaagccaaggacagttgaaaaccctggaagacagctttctaaaaagctcctttcccacccaggcagaagtggaacggctgagggtggagaccaagctgagcaggagggaaatcgactcctggttctcagagaggcggaagcttcgagacagcatggagcaggctgtgttggattccatggggtctggcaaaaagggctcagacgcggtagcccccaatggtgctctatcccgacttgatcagctctctggtgcccagttagctggttctttgcccagtccttcatcagcaattgtacaaaatcaagaacaggttcacctgctcaggagcacttttgcaagaacccagtggcccactcctcaggagtacgatcagttagctgccaagaccggcctggtccgaactgagattgtgcgctggttcaaggagaacagatgcttactaaaaactggaacgttgagctggctggagcagtaccagcggcatcacatgtcagatgaccgtggtcgtgatgccgtatcaagaaaggtggcaaaacaagttgctgagagcccaaagaatggaagcgaggcggcacatcagtatgccaaggaccccaaagcactcagcgaggaggactccgagaagctggtcccgaggatgaaagtgggtggtgatccaaccaaggactgtttggcaggcaagccctcagaggccacctcagacagatcagagggcagccgagatggccagggcagtgaggagaacgaggagtcaggcatcgtggactttgtggaggtgacagttggtgaggaggacgccatctcagagaagtggggtagctggagccggagagtagcagaaggcacagtggagagggcagactccgactccgacagcacccctgcagaggccggccaagcctagacagggcatcgggtctgaacctccgcactgacgagggaggtgctctgtctttgaagagagaagaaagccccgccccagtggctgtgggccacctcaccagcgactctgagcaggcgtgcttcagtggtgcctggaggccacaggaactccggagctctcaatgtccctcccagaggctgggtgggagttgttcatagtgccaaagtcctactactgcgttttcaatgggtccctgtgcgtagcctttgccttcgccccagccccgcctcttgctatactggaactgatttatacaatgtgggaattttgttacctttttaatcgagggcaacttcctttttccagcacttctgtggtaaggcgtttgcattttgttttgttttgttttgtttcacccccaggaaggagggctaaccacattgcttttcttttctctttcttcctttcactttagtaacgagggggagggagcattagcataagtaccactgtatctactggattttaggtaggacggatttcttctttaaggtagtttgacatgggagatgccttggtgggaagggctgacgtctggcgcaaagtgggatgagctcacaaagagccttccccatcaaacccttcccagttccccagctgccttttggggaccctgcctcagctggcttctcaactgccttggataattggggaacaggtggttgccctctttacaaatcgttttgaaataccagcagaaagggctcccacaacacttgatgtcaccatcactcttgggaaattaagagagtggtcttcccggcctaggtgtagtaccgaggtaaacatccctgcttttcttttctcttctcaccaccttttcttggtgtggcttttggcaagatttcagctcaaagcctcactaatggattgatttgttgttgttgttgttcctgttgtgtgtgtgtgtgtgtgtgtgtgtgtgtgtctgtgtgtgtgtgtgtgtg

SEQ ID NO: 376 - protein, 860 aa, Mus musculus
SQKLRISLSCTHPPTPERSCCSEADGMASKRKSTTPCMVRTSQVLEQDMLEEADRAKDKGAGMPQSDVTKDSWAAEPEHSSKETEVVEVKSMGENLSKKLQGGYECKYCPYSTQNLNEFTEHVDMQHPNVILNPLYVCAECNFTTKKYDSLSDHNSKFHPGETNFKLKLIKRNNQTVLEQSIEATNHVVPITASGPGSSDNDPGVSVGKTPMTKTGKLKADAKKVPKKPDEAAPENHMEGTARLVTDTAEILARLGSVELLQDSLGHVMPSVQLPPNINLVPKVPVPLNTTKYNSALDTNATMINSFNKFPYPTQAELSWLTAASKHPEEHIRIWFATQRLKHGISWSPEEVEEARKKMFNGTIQSVPPTITVLPAQLTPTKVSQPILQTALPCQILGQPSLVLTQVTSGSTTVSCSPITLAVAGVTNHGQKRPLVTPQAAPEPKRPHIAQVPEPPPKVANTPLTPASDRKKTKLQIAHLKASFLQSQFPDDAEVYRLIEVTGLARSEIKKWFSDHRYRCQRGIVHITSESLAKDQMAITGTRHGRTYHVYPDFAPQKFKEKSQGQLKTLEDSFLKSSFPTQAEVERLRVETKLSRREIDSWFSRKLRDSMEQAVLDSMGSGKKGSDAVAPNGALSRLDQLSGAQLAGSLPSPSSAIVQNQEQVHLLRSTFARTQWPTPQEYDQLAAKTGLVRTEIVRWFKENRCLLKTGTLSWLEQYQRHHMSDDRGRDAVSRKVAKQVAESPKNGSEAAHQYAKDPKALSEEDSEKLVPRMKVGGDPTKDCLAGKPSEATSDRSEGSRDGQGSEENEESGIVDFVEVTVGEEDAISEKWGSWSRRVAEGTVERADSDSDSTPAEAGQA
